(19) United States
(12) Patent Application Publication
(10) Pub. No.: US 2003/0215835 A1
(43) Pub. Date: Nov. 20, 2003

(54) Differentially-regulated prostate cancer genes

(76) Inventors: Zairen Sun, Rockville, MD (US); Gilbert Jay, North Bethesda, MD (US)

Correspondence Address: ORIGENE TECHNOLOGIES, INCORPORATED, 6 TAFT COURT, SUITE 100, ROCKVILLE, MD, 20850, US

(21) Appl. No.: 10/341,434

(22) Filed: Jan. 14, 2003

Related U.S. Application Data
(60) Provisional application No. 60/348,164, filed on Jan. 15, 2002.
(60) Provisional application No. 60/348,119, filed on Jan. 15, 2002.

(51) Int. Cl. C12Q 1/68; A61K 48/00; C12M 1/34

(52) U.S. Cl. 435/6; 514/44; 435/287.2

(57) ABSTRACT

The present invention relates to all facets of novel polynucleotides, the polypeptides they encode, antibodies and specific binding partners thereto, and their applications to research, diagnosis, drug discovery, therapy, clinical medicine, forensic science and medicine, etc. The polynucleotides are differentially-regulated in prostate cancer and are therefore useful in variety of ways, including, but not limited to, as molecular markers, as drug targets, and for detecting, diagnosing, staging, monitoring, prognosticating, preventing or treating, determining predisposition to, etc., diseases and conditions, to prostate cancer.

[0001] This application claims the benefit of U.S. Provisional Application Serial Nos. 60/348,164 and 60/348,119, both filed Jan. 15, 2002, which are hereby incorporated by reference in their entirety.

### DESCRIPTION OF THE INVENTION

[0002] The present invention relates to all facets of novel polynucleotides, the polypeptides they encode, antibodies and specific binding partners thereto, and their applications to research, diagnosis, drug discovery, therapy, clinical medicine, forensic science and medicine, etc. The polynucleotides are differentially regulated in prostate cancer and are therefore useful in variety of ways, including, but not limited to, as molecular markers, as drug targets, and for detecting, diagnosing, staging, monitoring, prognosticating, preventing or treating, determining predisposition to, etc., diseases and conditions,, especially relating to prostate cancer. The identification of specific genes, and groups of genes, expressed in pathways physiologically relevant to prostate cancer permits the definition of functional and disease pathways, and the delineation of targets in these pathways which are useful in diagnostic, therapeutic, and clinical applications. The present invention also relates to methods of using the polynucleotides and related products (proteins, antibodies, etc.) in business and computer-related methods, e.g., advertising, displaying, offering, selling, etc., such products for sale, commercial use, licensing, etc.

[0003] Prostate cancer is the most common form of cancer diagnosed in the American male, occurring predominantly in males over age 50. The number of men diagnosed with prostate cancer has steadily increased as a result of the increasing population of older men. The American Cancer Society estimates that in the year 2000, about 180,000 American men were diagnosed with prostate cancer and about 32,000 died from the disease. In comparison, 1998 estimates for lung cancer in men were 171,500 cases and 160,100 deaths, and for colorectal cancer, the estimates were 131,600 cases and 56,000 deaths. Despite these high numbers, 89 percent of men diagnosed with the disease will survive at least five years and 63 percent will survive at least 10 years.

[0004] Patients having prostate cancer display a wide range of phenotypes. In some men, following detection, the tumor remains a latent histological tumor and does not become clinically significant. However, in other men, the tumor progresses rapidly, metastasizing and killing the patient in a relatively short time. Prostate cancer can be cured if the tumor is confined to a small region of the gland and is discovered at early stage. In such cases, radiation or surgical removal often results in complete elimination of the disease. Frequently, however, the prostate cancer has already spread to surrounding tissue and metastasized to remote locations. In these cases, radiation and other therapies, are less likely to effect a complete cure.

[0005] Androgen deprivation is a conventional therapy to treat prostate cancer. Androgen blockade can be achieved through several different routes. Androgen suppressive drugs include, e.g., Lupron (leuprolide acetate), Casodex (bicalutamide), Eulexin (flutamide), Nilandron (nilutamide), Zoladex (goserelin acetate implant), and Viadur (leuprolide acetate), which act through several different mechanisms. While these drugs may offer remission and tumor regression in many cases, often the therapeutic effects are only temporary. Prostate tumors lose their sensitivity to such treatments, and become androgen-independent. Thus, new therapies are clearly needed.

[0006] The first clinical symptoms of prostate cancer are typically urinary disturbances, including painful and more frequent urination. Diagnosis for prostate cancer is usually accomplished using a combination of different procedures. Since the prostate is located next to the rectum, rectal digital examination allows the prostate to be examined manually for the presence of hyperplasia and abnormal tissue masses. Usually, this is the first line of detection. If a palpable mass is observed, a blood specimen can be assayed for prostate-specific antigen (PSA). Very little PSA is present in the blood of a healthy individual, but BPH and prostate cancer can cause large amounts of PSA to be released into the blood, indicating the presence of diseased tissue. Definitive diagnosis is generally accomplished by biopsy of the prostate tissue.

[0007] No single gene or protein has been identified which is responsible for the etiology of all prostate cancers. Although PSA is widely used as a diagnostic reagent, it has limitations in its sensitivity and its ability to detect early cancers. It is estimated that approximately 20% to 30% of tumors will be missed when PSA is used alone. It is likely that diagnostic and prognostic markers for prostate cancer disease will involve the identification and use of many different genes and gene products to reflect its multifactorial origin. With this in mind, combinations of the differentially-expressed genes of the present invention can be used as diagnostic and prognostic markers for prostate cancers.

[0008] A continuing goal is to characterize the gene expression patterns of the various prostate cancers to genetically differentiate them, providing important guidance in preventing, diagnosing, and treating cancers. Molecular pictures of cancer, such as the pattern of differentially-regulated genes identified herein, provide an important tool for molecularly dissecting and classifying cancer, identifying drug targets, providing prognosis and therapeutic information, etc. For instance, an array of polynucleotides corresponding to genes differentially regulated in prostate cancer can be used to screen tissue samples for the existence of cancer, to categorize the cancer (e.g., by the particular pattern observed), to grade the cancer (e.g., by the number of up- or down-regulated genes and their amounts of expression), to identify the source of a secondary tumor, to screen for metastatic cells, etc. These arrays can be used in combination with other markers, e.g., PSA, PMSA (prostate membrane specific antigen), or any of the grading systems used in clinical medicine.

[0009] As indicated by these studies, cancer is a highly diverse disease. Although all cancers share certain characteristics, the underlying cause and disease progression can differ significantly from patient to patient. So far, over a dozen distinct genes have been identified which, when mutant, result in a cancer. In breast cancer, alone, a handful of different genes have been isolated which either cause the cancer, or produce a predisposition to it. As a consequence, disease phenotypes for a particular cancer do not look all the same. In addition to the differences in the gene(s) responsible for the cancer, heterogeneity among individuals, e.g., in age, health, sex, and genetic background, can also influence the disease and its progression. Gene penetrance, in particular, can vary widely among population members. Recent studies have shown tremendous diversity in gene expression patterns among cancer patients. For these and other reasons, one gene/polypeptide target alone can be insufficient to diagnose or treat a cancer. Even a gene which is highly differentially-expressed and penetrant in cancer patients may not be so highly expressed in all patients and at all stages of the cancer. By selecting a set of genes and/or the polypeptides they encode, cancer diagnostics and therapeutics can be designed which effectively diagnose and treat a population of diseased individuals, rather than only a small handful when single genes are targeted.

[0010] Table 1 is a list of genes up-regulated in prostate cancer; Table 2 lists genes down-regulated. The column at the far left is the gene's alphanumeric designation. “GI#” indicates the accession number of the gene. “Classification” is the cellular localization of the gene product: membrane (e.g., a cell-surface molecule), secreted, intracellular, or nuclear. The characterization of the gene under the “description” heading is based on listing in GenBank. The nucleotide and amino acid sequences of the gene can be retrieved routinely from Genbank, e.g., by searching the accession number. These sequences, and all information referenced to the accession number, are incorporated by reference in their entirety. The numbers in the first column refer to nucleotide and amino acid sequence, respectively.

[0011] The polypeptide sequences was analyzed for the presence of functional domains using the publicly available Pfam program. Domains present in each polypeptide are listed under “domain.” Any abbreviations are those used in Pfam. The start of the domain is indicated by “seq-f” and the end of the domain by “seq-t.” The “score” is the statistical score of this match to the domain in bits. In general, a higher score indicates a better match. “E” is the statistical score of this match in Evalue (frequentist) approach. The smaller score in this case shows a better match between the domain and the query sequence. For more information on the program and scoring, see, e.g., Sonnhammer et al., Proteins: Structure, Function and Genetics 28:405-420 (1997); Sonnhammer et al., Nucleic Acids Research 26:320-322 (1998); Bateman et al., Nucleic Acids Research 27:260-262 (1999); Bateman et al., Nucleic Acids Research 28:263-266 (2000).

[0012] Nucleic Acids

[0013] In accordance with the present invention, genes have been identified which are differentially expressed in prostate cancer. Tables 1 and list genes which are differentially-regulated in the cancer. These genes can be further divided into groups based on additional characteristics of their expression and the tissues in which they are expressed. For instance, genes can be further subdivided based on the stage and/or grade of the cancer in which they are expressed. Genes can also be grouped based on their penetrance in a prostate cancer, e.g., expressed in all prostate cancer examined, expressed in a certain percentage of prostate cancer examined, etc. Additionally, genes can be categorized by their function and/or the polypeptides they encode. This includes, but is not limited to, cellular localization, functional activity (e.g., kinase, cytoskeletal element, or transcriptional factor), functional pathway (e.g., protein manufacture, cell signaling, cell movement, cell adhesion, responsivity to cAMP, energy production, etc.), etc. These groupings do not restrict or limit the use such genes in therapeutic, diagnostic, prognostic, etc., applications. For instance, a gene which is expressed in only some cancers (e.g., incompletely penetrant) may be useful in therapeutic applications to treat a subset of cancers. Similarly, a co-penetrant gene, or a gene which is expressed in prostate cancer and other normal tissues, may be useful as a therapeutic or diagnostic, even if its expression pattern is not highly prostate specific. Thus, the uses of the genes or their products are not limited by their patterns of expression.

[0014] In developing reagents for the diagnosis and treatment of a disease, it may be useful to know the cellular localization of a differentially expressed polypeptide to determine how to use it as a target. Proteins which are secreted or on the cell-surface are more readily accessible than intracellular proteins, and can be, e.g., blocked or inhibited to restore levels to normal.

[0015] In recent years, there have been numerous reports on specific targeting of tumor cells with monoclonal antibody-drug conjugates using cell-surface proteins. See, e.g., Chari., Adv. Drug Deliv. Res., 31: 89-104 (1998); Pietersz and Krauer, J. Drug Targeting, 2: 183-215 (1994); Sela et al., in Immunoconjugates, 189-216 (C. Vogel, ed. 1987); Ghose et al., in Targeted Drugs, 1-22 (E. Goldberg, ed. 1983); Diener et al., in Antibody mediated delivery systems, 1-23 (J. Rodwell, ed. 1988); Pietersz et al., in Antibody mediated delivery systems, 25-53 (J. Rodwell, ed. 1988); Bumol et al., in Antibody mediated delivery system, 55-79 (J. Rodwell, ed. 1988). Cytotoxic drugs such as methotrexate, daunorubicin, doxorubicin, vincristine, vinblastine, melphalan, mitomycin C, and chlorambucil have been conjugated to a variety of monoclonal antibodies. Therapeutic agents can be directly conjugated to the antibody, or through cleavable linkers which facilitate the release of the agent in active form only when it is inside the cell. See, e.g., U.S. Pat. No. 6,333,410.

[0016] By the phrase “differential expression,” it is meant that the levels of expression of a gene, as measured by its transcription or translation product, are different depending upon the specific cell-type or tissue (e.g., in an averaging assay that looks at a population of cells). There are no absolute amounts by which the gene expression levels must vary, as long as the differences are measurable.

[0017] The phrase “up-regulated” indicates that an mRNA transcript or other nucleic acid corresponding to a polynucleotide of the present invention is expressed in larger amounts in a cancer as compared to the same transcript expressed in normal cells from which the cancer was derived. The phrase “down-regulated” indicates that an mRNA transcript or other nucleic acid corresponding to a polynucleotide of the present invention is expressed in lower amounts in a cancer as compared to the same transcript expressed in normal cells from which the cancer was derived. In general, differential-regulation can be assessed by any suitable method, including any of the nucleic acid detection and hybridization methods mentioned below, as well as polypeptide-based methods. Up-regulation also includes going from substantially no expression in a normal tissue, from detectable expression in a normal tissue, from significant expression in a normal tissue, to higher levels in the cancer. Down-regulation also includes going from substantially no expression in a normal tissue, from detectable expression in a normal tissue, from significant expression in a normal tissue, to higher levels in the cancer.

[0018] Differential regulation can be determined by any suitable method, e.g., by comparing its abundance per gram of RNA (e.g., total RNA, polyadenylated mRNA, etc.) extracted from a prostate tissue in comparison to the corresponding normal tissue. The normal tissue can be from the same or different individual or source. For convenience, it can be supplied as a separate component or in a kit in combination with probes and other reagents for detecting genes. The quantity by which a nucleic acid is differentially-regulated can be any value, e.g., about 10% more or less of normal expression, about 50% more or less of normal expression, 2-fold more or less, 5-fold more or less, 10-fold more or less, etc.

[0019] The amount of transcript can also be compared to a different gene in the same sample, especially a gene whose abundance is known and substantially no different in its expression between normal and cancer cells (e.g., a “control” gene). If represented as a ratio, with the quantity of differentially-regulated gene transcript in the numerator and the control gene transcript in the denominator, the ratio would be larger, e.g., in prostate cancer than in a sample from normal prostate tissue.

[0020] Differential-regulation can arise through a number of different mechanisms. The present invention is not bound by any specific way through which it occurs. Differential-regulation of a polynucleotide can occur, e.g., by modulating (1) transcriptional rate of the gene (e.g., increasing its rate, inducing or stimulating its transcription from a basal, low-level rate, etc.), (2) the post-transcriptional processing of RNA transcripts, (3) the transport of RNA from the nucleus into the cytoplasm, (4) RNA nuclear and cytoplasmic turnover, and polypeptide turnover (e.g., by virtue of having higher stability or resistance to degradation), and combinations thereof. See, e.g., Tollervey and Caceras, Cell, 103:703-709, 2000.

[0021] A differentially-regulated polynucleotide is useful in a variety of different applications as described in greater details below. Because it is more abundant in cancer, it and its expression products can be used in a diagnostic test to assay for the presence of cancer, e.g., in tissue sections, in a biopsy sample, in total RNA, in lymph, in blood, etc. Differentially-regulated polynucleotides and polypeptides can be used individually, or in groups, to assess the cancer, e.g., to determine the specific type of cancer, its stage of development, the nature of the genetic defect, etc., or to assess the efficacy of a treatment modality. How to use polynucleotides in diagnostic and prognostic assays is discussed below. In addition, the polynucleotides and the polypeptides they encode, can serve as a target for therapy or drug discovery. A polypeptide, coded for by a differentially-regulated polynucleotide, which is displayed on the cell-surface, can be a target for immunotherapy to destroy, inhibit, etc., the diseased tissue. Differentially-regulated transcripts can also be used in drug discovery schemes to identify pharmacological agents which modulate, suppress, inhibit, activate, increase, etc., their differential-regulation, thereby preventing the phenotype associated with their expression. Thus, a differentially-regulated polynucleotide and its expression products of the present invention have significant applications in diagnostic, therapeutic, prognostic, drug development, and related areas.

[0022] The expression patterns of the selectively expressed genes disclosed herein can be described as a “fingerprint” in that they are a distinctive pattern displayed by a tissue. Just as with a fingerprint, an expression pattern can be used as a unique identifier to characterize the status of a tissue sample. The list of expressed sequences disclosed herein provides an example of such a tissue expression profile. It can be used as a point of reference to compare and characterize samples. Tissue fingerprints can be used in many ways, e.g., to classify a tissue as prostate cancer, to determine the origin of a metastatic cells, to assess the physiological status of a tissue, to determine the effect of a particular treatment regime on a tissue, and to evaluate the toxicity of a compound on a tissue of interest, to determine the presence of a cancer in a biopsy sample, to assess the efficacy of a cancer therapy in a human patient or a non-human animal model, to detect circulating cancer cells in blood or a lymph node biopsy, etc. While the expression profile of the complete gene set represented in Tables 1 and 2 may be most informative, a fingerprint containing expression information from less than the full collection can be useful, as well. In the same way that an incomplete fingerprint may contain enough of the pattern of whorls, arches, loops, and ridges, to identify the individual, a cell expression fingerprint containing less than the full complement may be adequate to provide useful and unique identifying and other information about the sample. Moreover, cancer is a multifactorial disease, involving genetic aberrations in more than gene locus. This multifaceted nature may be reflected in different cell expression profiles associated with prostate cancers arising in different individuals, in different locations in the same individual, or even within the same cancer locus. As a result, a complete match with a particular cell expression profile, as shown herein, is not necessary to classify a cancer as being of the same type or stage. Similarity to one cell expression profile, e.g., as compared to another, can be adequate to classify cancer types, grades, and stages.

[0023] For example, the tissue-selective genes disclosed herein represent the configuration of genes expressed by a normal tissue. To determine the effect of a toxin on a tissue, a sample of tissue is obtained prior to toxin exposure (“control”) and then at one or more time points after toxin exposure (“experimental”). An array of tissue-selective probes can be used to assess the expression patterns for both the control and experimental samples. Methods of making and using arrays are described below.

[0024] A mammalian polynucleotide, or fragment thereof, of the present invention is a polynucleotide having a nucleotide sequence obtainable from a natural source. When the species name is used, e.g., human, it indicates that the polynucleotide or polypeptide is obtainable from a natural source. It therefore includes naturally-occurring normal, naturally-occurring mutant, and naturally-occurring polymorphic alleles (e.g., SNPs), differentially-spliced transcripts, splice-variants, etc. By the term “naturally-occurring,” it is meant that the polynucleotide is obtainable from a natural source, e.g., animal tissue and cells, body fluids, tissue culture cells, forensic samples. Natural sources include, e.g., living cells obtained from tissues and whole organisms, tumors, cultured cell lines, including primary and immortalized cell lines. Naturally-occurring mutations can include deletions (e.g., a truncated amino- or carboxy-terminus), substitutions, inversions, or additions of nucleotide sequence. These genes can be detected and isolated by polynucleotide hybridization according to methods which one skilled in the art would know, e.g., as discussed below.

[0025] A polynucleotide according to the present invention can be obtained from a variety of different sources. It can be obtained from DNA or RNA, such as polyadenylated mRNA or total RNA, e.g., isolated from tissues, cells, or whole organism. The polynucleotide can be obtained directly from DNA or RNA, from a cDNA library, from a genomic library, etc. The polynucleotide can be obtained from a cell or tissue (e.g., from an embryonic or adult tissues) at a particular stage of development, having a desired genotype, phenotype, disease status, etc. The polynucleotides described in Tables 1 and 2 are reference to specific nucleotide sequences as listed in GenBank. The present invention relates to these sequences, as well as any naturally-occurring variants and polymorphisms. A polynucleotide which “codes without interruption” refers to a polynucleotide having a continuous open reading frame (“ORF”) as compared to an ORF which is interrupted by introns or other noncoding sequences.

[0026] Genomic

[0027] The present invention also relates genomic DNA from which the polynucleotides of the present invention can be derived. A genomic DNA coding for a human, mouse, or other mammalian polynucleotide, can be obtained routinely, for example, by screening a genomic library (e.g., a YAC library) with a polynucleotide of the present invention, or by searching nucleotide databases, such as GenBank and EMBL, for matches. Promoter and other regulatory regions can be identified upstream of coding and expressed RNAs, and assayed routinely for activity, e.g., by joining to a reporter gene (e.g., CAT, GFP, alkaline phosphatase, luciferase, galatosidase). A promoter obtained from a prostate cancer can be used, e.g., in gene therapy to obtain tissue-specific expression of a heterologous gene (e.g., coding for a therapeutic product or cytotoxin).

[0028] Constructs

[0029] A polynucleotide of the present invention can comprise additional polynucleotide sequences, e.g., sequences to enhance expression, detection, uptake, cataloging, tagging, etc. A polynucleotide can include only coding sequence; a coding sequence and additional non-naturally occurring or heterologous coding sequence (e.g., sequences coding for leader, signal, secretory, targeting, enzymatic, fluorescent, antibiotic resistance, and other functional or diagnostic peptides); coding sequences and non-coding sequences, e.g., untranslated sequences at either a 5′ or 3′ end, or dispersed in the coding sequence, e.g., introns.

[0030] A polynucleotide according to the present invention also can comprise an expression control sequence operably linked to a polynucleotide as described above. The phrase “expression control sequence” means a polynucleotide sequence that regulates expression of a polypeptide coded for by a polynucleotide to which it is functionally (“operably”) linked. Expression can be regulated at the level of the mRNA or polypeptide. Thus, the expression control sequence includes mRNA-related elements and protein-related elements. Such elements include promoters, enhancers (viral or cellular), ribosome binding sequences, transcriptional terminators, etc. An expression control sequence is operably linked to a nucleotide coding sequence when the expression control sequence is positioned in such a manner to effect or achieve expression of the coding sequence. For example, when a promoter is operably linked 5′ to a coding sequence, expression of the coding sequence is driven by the promoter. Expression control sequences can include an initiation codon and additional nucleotides to place a partial nucleotide sequence of the present invention in-frame in order to produce a polypeptide (e.g., pET vectors from Promega have been designed to permit a molecule to be inserted into all three reading frames to identify the one that results in polypeptide expression). Expression control sequences can be heterologous or endogenous to the normal gene.

[0031] A polynucleotide of the present invention can also comprise nucleic acid vector sequences, e.g., for cloning, expression, amplification, selection, etc. Any effective vector can be used. A vector is, e.g., a polynucleotide molecule which can replicate autonomously in a host cell, e.g., containing an origin of replication. Vectors can be useful to perform manipulations, to propagate, and/or obtain large quantities of the recombinant molecule in a desired host. A skilled worker can select a vector depending on the purpose desired, e.g., to propagate the recombinant molecule in bacteria, yeast, insect, or mammalian cells. The following vectors are provided by way of example. Bacterial: pQE70, pQE60, pQE-9 (Qiagen), pBS, pD10, Phagescript, phiX174, pBK Phagemid, pNH8A, pNH16a, pNH18Z, pNH46A (Stratagene); Bluescript KS+II (Stratagene); ptrc99a, pKK223-3, pKK233-3, pDR54 0, pRIT5 (Pharmacia). Eukaryotic: PWLNEO, pSV2CAT, pOG44, pXT1, pSG (Stratagene), pSVK3, PBPV, PMSG, pSVL (Pharmacia), pCR2.1/TOPO, pCRII/TOPO, pCR4/TOPO, pTrcHisB, pCMV6-XL4, etc. However, any other vector, e.g., plasmids, viruses, or parts thereof, may be used as long as they are replicable and viable in the desired host. The vector can also comprise sequences which enable it to replicate in the host whose genome is to be modified.

[0032] Hybridization

[0033] Polynucleotide hybridization, as discussed in more detail below, is useful in a variety of applications, including, in gene detection methods, for identifying mutations, for making mutations, to identify homologs in the same and different species, to identify related members of the same gene family, in diagnostic and prognostic assays, in therapeutic applications (e.g., where an antisense polynucleotide is used to inhibit expression), etc.

[0034] The ability of two single-stranded polynucleotide preparations to hybridize together is a measure of their nucleotide sequence complementarity, e.g., base-pairing between nucleotides, such as A-T, G-C, etc. The invention thus also relates to polynucleotides, and their complements, which hybridize to a polynucleotide comprising a nucleotide sequence as set forth in Tables 1 and 2, and genomic sequences thereof. A nucleotide sequence hybridizing to the latter sequence will have a complementary polynucleotide strand, or act as a template for one in the presence of a polymnerase (i.e., an appropriate polynucleotide synthesizing enzyme). The present invention includes both strands of polynucleotide, e.g., a sense strand and an anti-sense strand.

[0035] Hybridization conditions can be chosen to select polynucleotides which have a desired amount of nucleotide complementarity with the nucleotide sequences set forth in Tables 1 and 2 and genomic sequences thereof. A polynucleotide capable of hybridizing to such sequence, preferably, possesses, e.g., about 70%, 75%, 80%, 85%, 87%, 90%, 92%, 95%, 97%, 99%, or 100% complementarity, between the sequences. The present invention particularly relates to polynucleotide sequences which hybridize to the nucleotide sequences set forth in Tables 1 and 2 or genomic sequences thereof, under low or high stringency conditions. These conditions can be used, e.g., to select corresponding homologs in non-human species.

[0036] Polynucleotides which hybridize to polynucleotides of the present invention can be selected in various ways. Filter-type blots (i.e., matrices containing polynucleotide, such as nitrocellulose), glass chips, and other matrices and substrates comprising polynucleotides (short or long) of interest, can be incubated in a prehybridization solution (e.g., 6× SSC, 0.5% SDS, 100 μg/ml denatured salmon sperm DNA, 5× Denhardt's solution, and 50% formamide), at 22-68° C., overnight, and then hybridized with a detectable polynucleotide probe under conditions appropriate to achieve the desired stringency. In general, when high homology or sequence identity is desired, a high temperature can be used (e.g., 65° C.). As the homology drops, lower washing temperatures are used. For salt concentrations, the lower the salt concentration, the higher the stringency. The length of the probe is another consideration. Very short probes (e.g., less than 100 base pairs) are washed at lower temperatures, even if the homology is high. With short probes, formamide can be omitted. See, e.g., Current Protocols in Molecular Biology, Chapter 6, Screening of Recombinant Libraries; Sambrook et al., Molecular Cloning, 1989, Chapter 9.

[0037] For instance, high stringency conditions can be achieved by incubating the blot overnight (e.g., at least 12 hours) with a polynucleotide probe in a hybridization solution containing, e.g., about 5× SSC, 0.5% SDS, 100 μg/ml denatured salmon sperm DNA and 50% formamide, at 42° C.; or, at 42° C., or hybridizing at 42° C. in 5× 42° C. SSPE, 0.5% SDS, and 50% formamide, 100 mg/ml denatured salmon sperm DNA, and washing at 65° C. in 0.1% SSC and 0.1% SDS. Blots can be washed at high stringency conditions that allow, e.g., for less than 5% bp mismatch (e.g., wash twice in 0.1% SSC and 0.1% SDS for 30 min at 65° C.), i.e., selecting sequences having 95% or greater sequence identity.

[0038] Other non-limiting examples of high stringency conditions includes a final wash at 65° C. in aqueous buffer containing 30 mM NaCl and 0.5% SDS. Another example of high stringent conditions is hybridization in 7% SDS, 0.5 M NaPO₄, pH 7, 1 mM EDTA at 50° C., e.g., overnight, followed by one or more washes with a 1% SDS solution at 42° C. Whereas high stringency washes can allow for less than, e.g., less than 10%, 5% mismatch, reduced or low stringency conditions can permit up to 20% nucleotide mismatch. Hybridization at low stringency can be accomplished as above, but using lower formamide conditions, lower temperatures and/or lower salt concentrations, as well as longer periods of incubation time.

[0039] Hybridization can also be based on a calculation of melting temperature (Tm) of the hybrid formed between the probe and its target, as described in Sambrook et al.. Generally, the temperature Tm at which a short oligonucleotide (containing 18 nucleotides or fewer) will melt from its target sequence is given by the following equation: Tm=(number of A's and T's)×2° C.+(number of C's and G's)×4° C. For longer molecules, Tm=81.5+16.6 log₁₀[Na⁺]+0.41(% GC)−600/N where [Na⁺] is the molar concentration of sodium ions, % GC is the percentage of GC base pairs in the probe, and N is the length. Hybridization can be carried out at several degrees below this temperature to ensure that the probe and target can hybridize. Mismatches can be allowed for by lowering the temperature even further.

[0040] Stringent conditions can be selected to isolate sequences, and their complements, which have, e.g., at least about 90%, 95%, or 97%, nucleotide complementarity between the probe (e.g., a short polynucleotide of Table 1 or 2) and a target polynucleotide.

[0041] Other homologs of polynucleotides of the present invention can be obtained from mammalian and non-mammalian sources according to various methods. For example, hybridization with a polynucleotide can be employed to select homologs, e.g., as described in Sambrook et al., Molecular Cloning, Chapter 11, 1989. Such homologs can have varying amounts of nucleotide and amino acid sequence identity and similarity to such polynucleotides of the present invention. Mammalian organisms include, e.g., mice, rats, monkeys, pigs, cows, etc. Non-mammalian organisms include, e.g., vertebrates, invertebrates, zebra fish, chicken, Drosophila, C. elegans, Xenopus, yeast such as S. pombe, S. cerevisiae, roundworms, prokaryotes, plants, Arabidopsis, artemia, viruses, etc. The degree of nucleotide sequence identity between human and mouse can be about, e.g. 70% or more, 85% or more for open reading frames, etc.

[0042] Alignment

[0043] Alignments can be accomplished by using any effective algorithm. For pairwise alignments of DNA sequences, the methods described by Wilbur-Lipman (e.g., Wilbur and Lipman, Proc. Natl. Acad. Sci., 80:726-730, 1983) or Martinez/Needleman-Wunsch (e.g., Martinez, Nucleic Acid Res., 11:4629-4634, 1983) can be used. For instance, if the Martinez/Needleman-Wunsch DNA alignment is applied, the minimum match can be set at 9, gap penalty at 1.10, and gap length penalty at 0.33. The results can be calculated as a similarity index, equal to the sum of the matching residues divided by the sum of all residues and gap characters, and then multiplied by 100 to express as a percent. Similarity index for related genes at the nucleotide level in accordance with the present invention can be greater than 70%, 80%, 85%, 90%, 95%, 99%, or more. Pairs of protein sequences can be aligned by the Lipman-Pearson method (e.g., Lipman and Pearson, Science, 227:1435-1441, 1985) with k-tuple set at 2, gap penalty set at 4, and gap length penalty set at 12. Results can be expressed as percent similarity index, where related genes at the amino acid level in accordance with the present invention can be greater than 65%, 70%, 75%, 80%, 85%, 90%, 95%, 99%, or more. Various commercial and free sources of alignment programs are available, e.g., MegAlign by DNA Star, BLAST (National Center for Biotechnology Information), BCM (Baylor College of Medicine) Launcher, etc. etc. BLAST can be used to calculate amino acid sequence identity, amino acid sequence homology, and nucleotide sequence identity. These calculations can be made along the entire length of each of the target sequences which are to be compared.

[0044] After two sequences have been aligned, a “percent sequence identity” can be determined. For these purposes, it is convenient to refer to a Reference Sequence and a Compared Sequence, where the Compared Sequence is compared to the Reference Sequence. Percent sequence identity can be determined according to the following formula: Percent Identity=100[1−(C/R)], wherein C is the number of differences between the Reference Sequence and the Compared Sequence over the length of alignment between the Reference Sequence and the Compared Sequence where (i) each base or amino acid in the Reference Sequence that does not have a corresponding aligned base or amino acid in the Compared Sequence, (ii) each gap in the Reference Sequence, (iii) each aligned base or amino acid in the Reference Sequence that is different from an aligned base or amino acid in the Compared Sequence, constitutes a difference; and R is the number of bases or amino acids in the Reference Sequence over the length of the alignment with the Compared Sequence with any gap created in the Reference Sequence also being counted as a base or amino acid.

[0045] Percent sequence identity can also be determined by other conventional methods, e.g., as described in Altschul et al., Bull. Math. Bio. 48: 603-616, 1986 and Henikoff and Henikoff, Proc. Natl. Acad. Sci. USA 89:10915-10919, 1992.

[0046] Specific Polynucleotide Probes

[0047] A polynucleotide of the present invention can comprise any continuous nucleotide sequence of Tables 1 and 2, sequences which share sequence identity thereto, or complements thereof. The term “probe” refers to any substance that can be used to detect, identify, isolate, etc., another substance. A polynucleotide probe is comprised of nucleic acid can be used to detect, identify, etc., other nucleic acids, such as DNA and RNA.

[0048] These polynucleotides can be of any desired size that is effective to achieve the specificity desired. For example, a probe can be from about seven nucleotides to several thousand nucleotides, depending upon its use and purpose. For instance, a probe used as a primer PCR can be shorter than a probe used in an ordered array of polynucleotide probes. Probe sizes vary, and the invention is not limited in any way by their size, e.g., probes can be from about 7-2000 nucleotides, 7-1000, 8-700, 8-600, 8-500, 8-400, 8-300, 8-150, 8-100, 8-75, 7-50, 10-25, 14-16, at least about 8, at least about 10, 11, 12, 13, 14, 15, 16, 17, 18, 19, 20, 21, 22, 23, 24, at least about 15, at least about 25, 26, or more.

[0049] The polynucleotides can have non-naturally-occurring nucleotides, e.g., inosine, AZT, 3TC, etc. The polynucleotides can have 100% sequence identity or complementarity to a sequence of Table 1, or it can have mismatches or nucleotide substitutions, e.g., 1, 2, 3, 4, or 5 substitutions. The probes can be single-stranded or double-stranded.

[0050] In accordance with the present invention, a polynucleotide can be present in a kit, where the kit includes, e.g., one or more polynucleotides, a desired buffer (e.g., phosphate, tris, etc.), detection compositions, RNA or cDNA from different tissues to be used as controls, libraries, etc. The polynucleotide can be labeled or unlabeled, with radioactive or non-radioactive labels as known in the art. Kits can comprise one or more pairs of polynucleotides for amplifying nucleic acids specific for differentially-regulated genes of the present invention, e.g., comprising a forward and reverse primer effective in PCR. These include both sense and anti-sense orientations. For instance, in PCR-based methods (such as RT-PCR), a pair of primers are typically used, one having a sense sequence and the other having an antisense sequence.

[0051] Another aspect of the present invention is a nucleotide sequence that is specific to, or for, a selective polynucleotide. The phrases “specific for” or “specific to” a polynucleotide have a functional meaning that the polynucleotide can be used to identify the presence of one or more target genes in a sample and distinguish them from non-target genes. It is specific in the sense that it can be used to detect polynucleotides above background noise (“non-specific binding”). A specific sequence is a defined order of nucleotides (or amino acid sequences, if it is a polypeptide sequence) which occurs in the polynucleotide, e.g., in the nucleotide sequences selected from Tables 1 and 2 , and which is characteristic of that target sequence, and substantially no non-target sequences.

[0052] A probe or mixture of probes can comprise a sequence or sequences that are specific to a plurality of target sequences, e.g., where the sequence is a consensus sequence, a functional domain, etc., e.g., capable of recognizing a family of related genes. Such sequences can be used as probes in any of the methods described herein or incorporated by reference. Both sense and antisense nucleotide sequences are included. A specific polynucleotide according to the present invention can be determined routinely.

[0053] A polynucleotide comprising a specific sequence can be used as a hybridization probe to identify the presence of, e.g., human or mouse polynucleotide, in a sample comprising a mixture of polynucleotides, e.g., on a Northern blot. Hybridization can be performed under high stringent conditions (see, above) to select polynucleotides (and their complements which can contain the coding sequence) having at least 90%, 95%, 99%, etc., identity (i.e., complementarity) to the probe, but less stringent conditions can also be used. A specific polynucleotide sequence can also be fused in-frame, at either its 5′ or 3′ end, to various nucleotide sequences as mentioned throughout the patent, including coding sequences for enzymes, detectable markers, GFP, etc, expression control sequences, etc.

[0054] A polynucleotide probe, especially one that is specific to a polynucleotide of the present invention, can be used in gene detection and hybridization methods as already described. In one embodiment, a specific polynucleotide probe can be used to detect whether a particular tissue or cell-type is present in a target sample. To carry out such a method, a selective polynucleotide can be chosen which is characteristic of the desired target tissue. Such polynucleotide is preferably chosen so that it is expressed or displayed in the target tissue, but not in other tissues which are present in the sample. For instance, if detection of prostate is desired, it may not matter whether the selective polynucleotide is expressed in other tissues, as long as it is not expressed in cells normally present in blood, e.g., peripheral blood mononuclear cells. Starting from the selective polynucleotide, a specific polynucleotide probe can be designed which hybridizes (if hybridization is the basis of the assay) under the hybridization conditions to the selective polynucleotide, whereby the presence of the selective polynucleotide can be determined.

[0055] Probes which are specific for polynucleotides of the present invention can also be prepared using involve transcription-based systems, e.g., incorporating an RNA polymerase promoter into a selective polynucleotide of the present invention, and then transcribing anti-sense RNA using the polynucleotide as a template. See, e.g., U.S. Pat. No. 5,545,522.

[0056] Polynucleotide Composition

[0057] A polynucleotide according to the present invention can comprise, e.g., DNA, RNA, synthetic polynucleotide, peptide polynucleotide, modified nucleotides, dsDNA, ssDNA, ssRNA, dsRNA, and mixtures thereof. A polynucleotide can be single- or double-stranded, triplex, DNA:RNA, duplexes, comprise hairpins, and other secondary structures, etc. Nucleotides comprising a polynucleotide can be joined via various known linkages, e.g., ester, sulfamate, sulfamide, phosphorothioate, phosphoramidate, methylphosphonate, carbamate, etc., depending on the desired purpose, e.g., resistance to nucleases, such as RNAse H, improved in vivo stability, etc. See, e.g., U.S. Pat. No. 5,378,825. Any desired nucleotide or nucleotide analog can be incorporated, e.g., 6-mercaptoguanine, 8-oxo-guanine, etc.

[0058] Various modifications can be made to the polynucleotides, such as attaching detectable markers (avidin, biotin, radioactive elements, fluorescent tags and dyes, energy transfer labels, energy-emitting labels, binding partners, etc.) or moieties which improve hybridization, detection, and/or stability. The polynucleotides can also be attached to solid supports, e.g., nitrocellulose, magnetic or paramagnetic microspheres (e.g., as described in U.S. Pat. No. 5,411,863; U.S. Pat. No. 5,543,289; for instance, comprising ferromagnetic, supermagnetic, paramagnetic, superparamagnetic, iron oxide and polysaccharide), nylon, agarose, diazotized cellulose, latex solid microspheres, polyacrylamides, etc., according to a desired method. See, e.g., U.S. Pat. Nos. 5,470,967, 5,476,925, and 5,478,893.

[0059] Polynucleotide according to the present invention can be labeled according to any desired method. The polynucleotide can be labeled using radioactive tracers such as ³²P, ³⁵S, ³H, or ¹⁴C, to mention some commonly used tracers. The radioactive labeling can be carried out according to any method, such as, for example, terminal labeling at the 3′ or 5′ end using a radiolabeled nucleotide, polynucleotide kinase (with or without dephosphorylation with a phosphatase) or a ligase (depending on the end to be labeled). A non-radioactive labeling can also be used, combining a polynucleotide of the present invention with residues having immunological properties (antigens, haptens), a specific affinity for certain reagents (ligands), properties enabling detectable enzyme reactions to be completed (enzymes or coenzymes, enzyme substrates, or other substances involved in an enzymatic reaction), or characteristic physical properties, such as fluorescence or the emission or absorption of light at a desired wavelength, etc.

[0060] Nucleic Acid Detection Methods

[0061] Another aspect of the present invention relates to methods and processes for detecting differentially-regulated genes of the present invention. Detection methods have a variety of applications, including for diagnostic, prognostic, forensic, and research applications. To accomplish gene detection, a polynucleotide in accordance with the present invention can be used as a “probe.” The term “probe” or “polynucleotide probe” has its customary meaning in the art, e.g., a polynucleotide which is effective to identify (e.g., by hybridization), when used in an appropriate process, the presence of a target polynucleotide to which it is designed. Identification can involve simply determining presence or absence, or it can be quantitative, e.g., in assessing amounts of a gene or gene transcript present in a sample. Probes can be useful in a variety of ways, such as for diagnostic purposes, to identify homologs and to detect, quantitate, or isolate a polynucleotide of the present invention in a test sample.

[0062] Assays can be utilized which permit quantification and/or presence/absence detection of a target nucleic acid in a sample. Assays can be performed at the single-cell level, or in a sample comprising many cells, where the assay is “averaging” expression over the entire collection of cells and tissue present in the sample. Any suitable assay format can be used, including, but not limited to, e.g., Southern blot analysis, Northern blot analysis, polymerase chain reaction (“PCR”) (e.g., Saiki et al., Science, 241:53, 1988; U.S. Pat. Nos. 4,683,195, 4,683,202, and 6,040,166; PCR Protocols: A Guide to Methods and Applications, Innis et al., eds., Academic Press, New York, 1990), reverse transcriptase polymerase chain reaction (“RT-PCR”), anchored PCR, rapid amplification of cDNA ends (“RACE”) (e.g., Schaefer in Gene Cloning and Analysis: Current Innovations, Pages 99-115, 1997), ligase chain reaction (“LCR”) (EP 320 308), one-sided PCR (Ohara et al., Proc. Natl. Acad. Sci., 86:5673-5677, 1989), indexing methods (e.g., U.S. Pat. No. 5,508,169), in situ hybridization, differential display (e.g., Liang et al., Nucl. Acid. Res., 21:3269-3275, 1993; U.S. Pat. Nos. 5,262,311, 5,599,672 and 5,965,409; WO97/18454; Prashar and Weissman, Proc. Natl. Acad. Sci., 93:659-663, and U.S. Pat. Nos. 6,010,850 and 5,712,126; Welsh et al., Nucleic Acid Res., 20:4965-4970, 1992, and U.S. Pat. No. 5,487,985) and other RNA fingerprinting techniques, nucleic acid sequence based amplification (“NASBA”) and other transcription based amplification systems (e.g., U.S. Pat. Nos. 5,409,818 and 5,554,527; WO 88/10315), polynucleotide arrays (e.g., U.S. Pat. Nos. 5,143,854, 5,424,186; 5,700,637, 5,874,219, and 6,054,270; PCT WO 92/10092; PCT WO 90/15070), Qbeta Replicase (PCT/US87/00880), Strand Displacement Amplification (“SDA”), Repair Chain Reaction (“RCR”), nuclease protection assays, subtraction-based methods, Rapid-Scan™, etc. Additional useful methods include, but are not limited to, e.g., template-based amplification methods, competitive PCR (e.g., U.S. Pat. No. 5,747,251), redox-based assays (e.g., U.S. Pat. No. 5,871,918), Taqman-based assays (e.g., Holland et al., Proc. Natl. Acad, Sci., 88:7276-7280, 1991; U.S. Pat. Nos. 5,210,015 and 5,994,063), real-time fluorescence-based monitoring (e.g., U.S. Pat. 5,928,907), molecular energy transfer labels (e.g., U.S. Pat. Nos. 5,348,853, 5,532,129, 5,565,322, 6,030,787, and 6,117,635; Tyagi and Kramer, Nature Biotech., 14:303-309, 1996). Any method suitable for single cell analysis of gene or protein expression can be used, including in situ hybridization, immunocytochemistry, MACS, FACS, flow cytometry, etc. For single cell assays, expression products can be measured using antibodies, PCR, or other types of nucleic acid amplification (e.g., Brady et al., Methods Mol. & Cell. Biol. 2, 17-25, 1990; Eberwine et al., 1992, Proc. Natl Acad. Sci., 89, 3010-3014, 1992; U.S. Pat. No. 5,723,290). These and other methods can be carried out conventionally, e.g., as described in the mentioned publications.

[0063] Many of such methods may require that the polynucleotide is labeled, or comprises a particular nucleotide type useful for detection. The present invention includes such modified polynucleotides that are necessary to carry out such methods. Thus, polynucleotides can be DNA, RNA, DNA:RNA hybrids, PNA, etc., and can comprise any modification or substituent which is effective to achieve detection.

[0064] Detection can be desirable for a variety of different purposes, including research, diagnostic, prognostic, and forensic. For diagnostic purposes, it may be desirable to identify the presence or quantity of a polynucleotide sequence in a sample, where the sample is obtained from tissue, cells, body fluids, etc. In a preferred method as described in more detail below, the present invention relates to a method of detecting a polynucleotide comprising, contacting a target polynucleotide in a test sample with a polynucleotide probe under conditions effective to achieve hybridization between the target and probe; and detecting hybridization.

[0065] Any test sample in which it is desired to identify a polynucleotide or polypeptide thereof can be used, including, e.g., blood, urine, saliva, stool (for extracting nucleic acid, see, e.g., U.S. Pat. No. 6,177,251), swabs comprising tissue, biopsied tissue, tissue sections, cultured cells, etc.

[0066] Detection can be accomplished in combination with polynucleotide probes for other genes, e.g., genes which are expressed in other disease states, tissues, cells, such as brain, heart, kidney, spleen, thymus, liver, stomach, small intestine, colon, muscle, lung, testis, placenta, pituitary, thyroid, skin, adrenal gland, pancreas, salivary gland, uterus, ovary, peripheral blood cells (T-cells, lymphocytes, etc.), embryo, normal, fat, adult and embryonic stem cells, specific cell-types, such as endothelial, epithelial, etc.

[0067] Polynucleotides can be used in wide range of methods and compositions, including for detecting, diagnosing, staging, grading, assessing, prognosticating, etc. diseases and disorders associated with differentially-regulated genes of the present invention, for monitoring or assessing therapeutic and/or preventative measures, in ordered arrays, etc. Any method of detecting genes and polynucleotides of Tables 1 and 2 can be used; certainly, the present invention is not to be limited how such methods are implemented.

[0068] Along these lines, the present invention relates to methods of detecting differentially-regulated genes described herein in a sample comprising nucleic acid. Such methods can comprise one or more the following steps in any effective order, e.g., contacting said sample with a polynucleotide probe under conditions effective for said probe to hybridize specifically to nucleic acid in said sample, and detecting the presence or absence of probe hybridized to nucleic acid in said sample, wherein said probe is a polynucleotide which is selected from Tables 1 and 2, a polynucleotide having, e.g., about 70%, 80%, 85%, 90%, 95%, 99%, or more sequence identity thereto, effective or specific fragments thereof, or complements thereto. The detection method can be applied to any sample, e.g., cultured primary, secondary, or established cell lines, tissue biopsy, blood, urine, stool, and other bodily fluids, for any purpose.

[0069] Contacting the sample with probe can be carried out by any effective means in any effective environment. It can be accomplished in a solid, liquid, frozen, gaseous, amorphous, solidified, coagulated, colloid, etc., mixtures thereof, matrix. For instance, a probe in an aqueous medium can be contacted with a sample which is also in an aqueous medium, or which is affixed to a solid matrix, or vice-versa.

[0070] Generally, as used throughout the specification, the term “effective conditions” means, e.g., the particular milieu in which the desired effect is achieved. Such a milieu, includes, e.g., appropriate buffers, oxidizing agents, reducing agents, pH, co-factors, temperature, ion concentrations, suitable age and/or stage of cell (such as, in particular part of the cell cycle, or at a particular stage where particular genes are being expressed) where cells are being used, culture conditions (including substrate, oxygen, carbon dioxide, etc.). When hybridization is the chosen means of achieving detection, the probe and sample can be combined such that the resulting conditions are functional for said probe to hybridize specifically to nucleic acid in said sample.

[0071] The phrase “hybridize specifically” indicates that the hybridization between single-stranded polynucleotides is based on nucleotide sequence complementarity. The effective conditions are selected such that the probe hybridizes to a preselected and/or definite target nucleic acid in the sample. For instance, if detection of a polynucleotide set forth in Table 1 is desired, a probe can be selected which can hybridize to such target gene under high stringent conditions, without significant hybridization to other genes in the sample. To detect homologs of a polynucleotide set forth in Tables 1 and 2, the effective hybridization conditions can be less stringent, and/or the probe can comprise codon degeneracy, such that a homolog is detected in the sample.

[0072] As already mentioned, the methods can be carried out by any effective process, e.g., by Northern blot analysis, polymerase chain reaction (PCR), reverse transcriptase PCR, RACE PCR, in situ hybridization, etc., as indicated above. When PCR based techniques are used, two or more probes are generally used. One probe can be specific for a defined sequence which is characteristic of a selective polynucleotide, but the other probe can be specific for the selective polynucleotide, or specific for a more general sequence, e.g., a sequence such as polyA which is characteristic of mRNA, a sequence which is specific for a promoter, ribosome binding site, or other transcriptional features, a consensus sequence (e.g., representing a functional domain). For the former aspects, 5′ and 3′ probes (e.g., polyA, Kozak, etc.) are preferred which are capable of specifically hybridizing to the ends of transcripts. When PCR is utilized, the probes can also be referred to as “primers” in that they can prime a DNA polymerase reaction.

[0073] In addition to testing for the presence or absence of polynucleotides, the present invention also relates to determining the amounts at which polynucleotides of the present invention are expressed in sample and determining the differential expression of such polynucleotides in samples.. Such methods can involve substantially the same steps as described above for presence/absence detection, e.g., contacting with probe, hybridizing, and detecting hybridized probe, but using more quantitative methods and/or comparisons to standards.

[0074] The amount of hybridization between the probe and target can be determined by any suitable methods, e.g., PCR, RT-PCR, RACE PCR, Northern blot, polynucleotide microarrays, Rapid-Scan, etc., and includes both quantitative and qualitative measurements. For further details, see the hybridization methods described above and below. Determining by such hybridization whether the target is differentially expressed (e.g., up-regulated or down-regulated) in the sample can also be accomplished by any effective means. For instance, the target's expression pattern in the sample can be compared to its pattern in a known standard, such as in a normal tissue, or it can be compared to another gene in the same sample. When a second sample is utilized for the comparison, it can be a sample of normal tissue that is known not to contain diseased cells. The comparison can be performed on samples which contain the same amount of RNA (such as polyadenylated RNA or total RNA), or, on RNA extracted from the same amounts of starting tissue. Such a second sample can also be referred to as a control or standard. Hybridization can also be compared to a second target in the same tissue sample. Experiments can be performed that determine a ratio between the target nucleic acid and a second nucleic acid (a standard or control), e.g., in a normal tissue. When the ratio between the target and control are substantially the same in a normal and sample, the sample is determined or diagnosed not to contain cells. However, if the ratio is different between the normal and sample tissues, the sample is determined to contain cancer cells. The approaches can be combined, and one or more second samples, or second targets can be used. Any second target nucleic acid can be used as a comparison, including “housekeeping” genes, such as beta-actin, alcohol dehydrogenase, or any other gene whose expression does not vary depending upon the disease status of the cell.

[0075] Methods of Identifying Polymorphisms, Mutations, etc., of a Differentially-Regulated Gene

[0076] Polynucleotides of the present invention can also be utilized to identify mutant alleles, SNPs, gene rearrangements and modifications, and other polymorphisms of the wild-type gene. Mutant alleles, polymorphisms, SNPs, etc., can be identified and isolated from cancers that are known, or suspected to have, a genetic component. Identification of such genes can be carried out routinely (see, above for more guidance), e.g., using PCR, hybridization techniques, direct sequencing, mismatch reactions (see, e.g., above), RFLP analysis, SSCP (e.g., Orita et al., Proc. Natl. Acad. Sci., 86:2766, 1992), etc., where a polynucleotide having a sequence selected from Table 1 or 2 is used as a probe. The selected mutant alleles, SNPs, polymorphisms, etc., can be used diagnostically to determine whether a subject has, or is susceptible to a disorder associated with a differentially-regulated gene, as well as to design therapies and predict the outcome of the disorder. Methods involve, e.g., diagnosing a disorder associated with a differentially-regulated gene or determining susceptibility to a disorder, comprising, detecting the presence of a mutation in a gene represented by a polynucleotide selected from Table 1 or 2. The detecting can be carried out by any effective method, e.g., obtaining cells from a subject, determining the gene sequence or structure of a target gene (using, e.g., mRNA, cDNA, genomic DNA, etc), comparing the sequence or structure of the target gene to the structure of the normal gene, whereby a difference in sequence or structure indicates a mutation in the gene in the subject. Polynucleotides can also be used to test for mutations, SNPs, polymorphisms, etc., e.g., using mismatch DNA repair technology as described in U.S. Pat. No. 5,683,877; U.S. Pat. No. 5,656,430; Wu et al., Proc. Natl. Acad. Sci., 89:8779-8783, 1992.

[0077] The present invention also relates to methods of detecting polymorphisms in a differentially-regulated gene, comprising, e.g., comparing the structure of: genomic DNA comprising all or part of said gene, mRNA comprising all or part of said gene, cDNA comprising all or part of said gene, or a polypeptide comprising all or part of said gene, with the structure of said gene as set forth herein. The methods can be carried out on a sample from any source, e.g., cells, tissues, body fluids, blood, urine, stool, hair, egg, sperm, etc.

[0078] These methods can be implemented in many different ways. For example, “comparing the structure” steps include, but are not limited to, comparing restriction maps, nucleotide sequences, amino acid sequences, RFLPs, DNAse sites, DNA methylation fingerprints (e.g., U.S. Pat. No. 6,214,556), protein cleavage sites, molecular weights, electrophoretic mobilities, charges, ion mobility, etc., between a standard gene and a test gene. The term “structure” can refer to any physical characteristics or configurations which can be used to distinguish between nucleic acids and polypeptides. The methods and instruments used to accomplish the comparing step depends upon the physical characteristics which are to be compared. Thus, various techniques are contemplated, including, e.g., sequencing machines (both amino acid and polynucleotide), electrophoresis, mass spectrometer (U.S. Pat. Nos. 6,093,541, 6,002,127), liquid chromatography, HPLC, etc.

[0079] To carry out such methods, “all or part” of the gene or polypeptide can be compared. For example, if nucleotide sequencing is utilized, the entire gene can be sequenced, including promoter, introns, and exons, or only parts of it can be sequenced and compared, e.g., exon 1, exon 2, etc.

[0080] Polynucleotide Expression, Polypeptides Produced Thereby, and Specific-Binding Partners Thereto

[0081] A polynucleotide according to the present invention can be expressed in a variety of different systems, in vitro and in vivo, according to the desired purpose. For example, a polynucleotide can be inserted into an expression vector, introduced into a desired host, and cultured under conditions effective to achieve expression of a polypeptide coded for by the polynucleotide, to search for specific binding partners. Effective conditions include any culture conditions which are suitable for achieving production of the polypeptide by the host cell, including effective temperatures, pH, medium, additives to the media in which the host cell is cultured (e.g., additives which amplify or induce expression such as butyrate, or methotrexate if the coding polynucleotide is adjacent to a dhfr gene), cycloheximide, cell densities, culture dishes, etc. A polynucleotide can be introduced into the cell by any effective method including, e.g., naked DNA, calcium phosphate precipitation, electroporation, injection, DEAE-Dextran mediated transfection, fusion with liposomes, association with agents which enhance its uptake into cells, viral transfection. A cell into which a polynucleotide of the present invention has been introduced is a transformed host cell. The polynucleotide can be extrachromosomal or integrated into a chromosome(s) of the host cell. It can be stable or transient. An expression vector is selected for its compatibility with the host cell. Host cells include, mammalian cells, e.g., COS, CV1, BHK, CHO, HeLa, LTK, NIH 3T3, PC-3 (CRL-1435), LNCaP (CRL-1740), CA-HPV-10 (CRL-2220), PZ-HPV-7 (CRL-2221), MDA-PCa 2b (CRL-2422), 22Rv1 (CRL2505), NCI-H660 (CRL-5813), HS 804.Sk (CRL-7535), LNCaP-FGF (CRL-10995), RWPE-1 (CRL-11609), RWPE-2 (CRL-11610), PWR-1E (CRL 11611), rat MAT-Ly-LuB-2 (CRL-2376), and other prostate cells, insect cells, such as Sf9 (S. frugipeda) and Drosophila, bacteria, such as E. coli, Streptococcus, bacillus, yeast, such as Sacharomyces, S. cerevisiae, fungal cells, plant cells, embryonic or adult stem cells (e.g., mammalian, such as mouse or human).

[0082] Expression control sequences are similarly selected for host compatibility and a desired purpose, e.g., high copy number, high amounts, induction, amplification, controlled expression. Other sequences which can be employed include enhancers such as from SV40, CMV, RSV, inducible promoters, cell-type specific elements, or sequences which allow selective or specific cell expression. Promoters that can be used to drive its expression, include, e.g., the endogenous promoter, MMTV, SV40, trp, lac, tac, or T7 promoters for bacterial hosts; or alpha factor, alcohol oxidase, or PGH promoters for yeast. RNA promoters can be used to produced RNA transcripts, such as T7 or SP6. See, e.g., Melton et al., Polynucleotide Res., 12(18):7035-7056, 1984; Dunn and Studier. J. Mol. Bio., 166:477-435, 1984; U.S. Pat. No. 5,891,636; Studier et al., Gene Expression Technology, Methods in Enzymology, 85:60-89, 1987. In addition, as discussed above, translational signals (including in-frame insertions) can be included.

[0083] When a polynucleotide is expressed as a heterologous gene in a transfected cell line, the gene is introduced into a cell as described above, under effective conditions in which the gene is expressed. The term “heterologous” means that the gene has been introduced into the cell line by the “hand-of-man.” Introduction of a gene into a cell line is discussed above. The transfected (or transformed) cell expressing the gene can be lysed or the cell line can be used intact.

[0084] For expression and other purposes, a polynucleotide can contain codons found in a naturally-occurring gene, transcript, or cDNA, for example, e.g., as set forth in Table 1 or 2, or it can contain degenerate codons kcoding for the same amino acid sequences. For instance, it may be desirable to change the codons in the sequence to optimize the sequence for expression in a desired host. See, e.g., U.S. Pat. Nos. 5,567,600 and 5,567,862. A polypeptide according to the present invention can be recovered from natural sources, transformed host cells (culture medium or cells) according to the usual methods.

[0085] The present invention also relates to specific-binding partners. These include antibodies which are specific for polypeptides encoded by polynucleotides of the present invention, as well as other binding-partners which interact with polynucleotides and polypeptides of the present invention. Protein-protein interactions between polypeptides of Tables 1 or 2, and other polypeptides and binding partners can be identified using any suitable methods, e.g., protein binding assays (e.g., filtration assays, chromatography, etc.), yeast two-hybrid system (Fields and Song, Nature, 340: 245-247, 1989), protein arrays, gel-shift assays, FRET (fluorescence resonance energy transfer) assays, etc. Nucleic acid interactions (e.g., protein-DNA or protein-RNA) can be assessed using gel-shift assays, e.g., as carried out in U.S. Pat. Nos. 6,333,407 and 5,789,538.

[0086] Antibodies, e.g., polyclonal, monoclonal, recombinant, chimeric, humanized, single-chain, Fab, and fragments thereof, can be prepared according to any desired method. See, also, screening recombinant immunoglobulin libraries (e.g., Orlandi et al., Proc. Natl. Acad. Sci., 86:3833-3837, 1989; Huse et al., Science, 256:1275-1281, 1989); in vitro stimulation of lymphocyte populations; Winter and Milstein, Nature, 349: 293-299, 1991. The antibodies can be IgM, IgG, subtypes, IgG2a, IgG1, etc. Antibodies, and immune responses, can also be generated by administering naked DNA See, e.g., U.S. Pat. Nos. 5,703,055; 5,589,466; 5,580,859. Antibodies can be used from any source, including, goat, rabbit, mouse, chicken (e.g., IgY; see, Duan, WO/029444 for methods of making antibodies in avian hosts, and harvesting the antibodies from the eggs). An antibody specific for a polypeptide means that the antibody recognizes a defined sequence of amino acids within or including the polypeptide. Other specific binding partners include, e.g., aptamers and PNA, can be prepared against specific epitopes or domains of differentially regulated genes. The preparation of polyclonal, monoclonal, single-chain, antibody fragments, and other antibody types and forms are well-known to those skilled in the art.

[0087] Methods of Detecting Polypeptides

[0088] Polypeptides coded for by a differentially-regulated gene of the present invention can be detected, visualized, determined, quantitated, etc. according to any effective method. Useful methods include, e.g., but are not limited to, immunoassays, RIA (radioimimunoassay), ELISA, (enzyme-linked-immunosorbent assay), immunofluorescence, flow cytometry, histology, electron microscopy, light microscopy, in situ assays, immunoprecipitation, Western blot, etc.

[0089] Immunoassays may be carried in liquid or on biological support. For instance, a sample (e.g., blood, stool, urine, cells, tissue, body fluids, etc.) can be brought in contact with and immobilized onto a solid phase support or carrier such as nitrocellulose, or other solid support that is capable of immobilizing cells, cell particles or soluble proteins. The support may then be washed with suitable buffers followed by treatment with the detectably labeled differentially-regulated gene specific antibody. The solid phase support can then be washed with a buffer a second time to remove unbound antibody. The amount of bound label on solid support may then be detected by conventional means.

[0090] A “solid phase support or carrier” includes any support capable of binding an antigen, antibody, or other specific binding partner. Supports or carriers include glass, polystyrene, polypropylene, polyethylene, dextran, nylon, amylases, natural and modified celluloses, t in an enzyme immunoassay (EIA). See, e.g., Voller, A., “The Enzyme Linked Immunosorbent Assay (ELISA),” 1978, Diagnostic Horizons 2, 1-7, Microbiological Associates Quarterly Publication, Walkersville, Md.); Voller, A. et al., 1978, J. Clin. Pathol. 31, 507-520; Butler, J. E., 1981, Meth. Enzymol. 73, 482-523; Maggio, E. (ed.), 1980, Enzyme Immunoassay, CRC Press, Boca Raton, Fla. The enzyme which is bound to the antibody will react with an appropriate substrate, preferably a chromogenic substrate, in such a manner as to produce a chemical moiety that can be detected, for example, by spectrophotometric, fluorimetric or by visual means. Enzymes that can be used to detectably label the antibody include, but are not limited to, malate dehydrogenase, staphylococcal nuclease, delta-5-steroid isomerase, yeast alcohol dehydrogenase, .alpha.-glycerophosphate, dehydrogenase, triose phosphate isomerase, horseradish peroxidase, alkaline phosphatase, asparaginase, glucose oxidase, .beta.-galactosidase, ribonuclease, urease, catalase, glucose-6-phosphate dehydrogenase, glucoamylase and acetylcholinesterase. The detection can be accomplished by colorimetric methods that employ a chromogenic substrate for the enzyme. Detection may also be accomplished by visual comparison of the extent of enzymatic reaction of a substrate in comparison with similarly prepared standards.

[0091] Detection may also be accomplished using any of a variety of other immunoassays. For example, by radioactively labeling the antibodies or antibody fragments, it is possible to detect differentially-regulated peptides through the use of a radioimmunoassay (RIA). See, e.g., Weintraub, B., Principles of Radioimmunoassays, Seventh Training Course on Radioligand Assay Techniques, The Endocrine Society, March, 1986. The radioactive isotope can be detected by such means as the use of a gamma counter or a scintillation counter or by autoradiography.

[0092] It is also possible to label the antibody with a fluorescent compound. When the fluorescently labeled antibody is exposed to light of the proper wave length, its presence can then be detected due to fluorescence. Among the most commonly used fluorescent labeling compounds are fluorescein isothiocyanate, rhodamine, phycoerythrin, phycocyanin, allophycocyanin, o-phthaldehyde and fluorescamine. The antibody can also be detectably labeled using fluorescence emitting metals such as those in the lanthanide series. These metals can be attached to the antibody using such metal chelating groups as diethylenetriaminepentacetic acid (DTPA) or ethylenediaminetetraacetic acid (EDTA).

[0093] The antibody also can be detectably labeled by coupling it to a chemiluminescent compound. The presence of the chemiluminescent-tagged antibody is then determined by detecting the presence of luminescence that arises during the course of a chemical reaction. Examples of useful chemiluminescent labeling compounds are luminol, isoluminol, theromatic acridinium ester, imidazole, acridinium salt and oxalate ester.

[0094] Likewise, a bioluminescent compound may be used to label the antibody of the present invention. Bioluminescence is a type of chemiluminescence found in biological systems in which a catalytic protein increases the efficiency of the chemiluminescent reaction. The presence of a bioluminescent protein is determined by detecting the presence of luminescence. Important bioluminescent compounds for purposes of labeling are luciferin, luciferase and aequorin.

[0095] Tissue and Disease

[0096] The prostate is a secretory organ surrounding the neck of the bladder and urethra. Its primary function is to produce fluids and other materials necessary for sperm transport and maintenance. Structurally, it has both glandular and nonglandular components. The glandular component is predominantly comprised of ducts and acini responsible for the production and transport prostatic fluids. Epithelial cells are the main identifiable cell found in these regions, primarily of the basal and secretory types, but also endocrine-paracrine and transitional epithelial. The non-glandular component contains the capsular and muscle tissues, which, respectively, hold the organ together and function in fluid discharge. See, e.g., Histology for Pathologists, Sternberg, S. S., editor, Raven Press, NY, 1992, Chapter 40.

[0097] The major diseases of the prostate include, e.g., prostatic hyperplasia (BPH), prostatitis, and prostate cancer (e.g., prostatic adenocarcinoma). BPH is a benign, proliferative disease of the prostatic epithelial cells. While it may cause urinary tract obstruction in some patients, for the most part, it is generally asymptomatic. Prostate cancer, on the other hand, is the most common form of cancer in white males in the United States, occurring predominantly in males over age 50. The prevalence of prostate diseases, such as prostate cancer, has made the discovery of prostate selective markers and gene expression patterns of great importance.

[0098] The most common scale of assessing prostate pathology is the Gleason grading system. See, e.g., Bostwick, Am. J Clin. Path., 102: s38-s56, 1994. Once the cancer is identified, staging can assess the size, location, and extent of the cancer. Several different staging scales are commonly used, including stages A-D, and Tumor-Nodes-Metastases (TNM). For treatment, diagnosis, staging, etc., of prostate conditions, methods can be carried out analogously to, and in combination with, U.S. Pat. Nos. 6,107,090; 6,057,116; 6,034,218; 6,004,267; 5,919,638; 5,882,864; 5,763,202; 5,747,264; 5,688,649; 5,552,277.

[0099] In addition, the present invention relates to methods of assessing a therapeutic or preventative intervention in a subject having a prostate cancer, comprising, e.g., detecting the expression levels of up-regulated target genes, wherein the target genes comprise a gene which is represented by a sequence selected from Table 1 or 2, or, a gene represented by a sequence having 95% sequence identity or more to a sequence selected from Table 1 or 2. By “therapeutic or preventative intervention,” it is meant, e.g., a drug administered a patient, surgery, radiation, chemotherapy, and other measures taken to prevent a cancer or treat a cancer.

[0100] Grading, Staging, Comparing, Assessing, Methods and Compositions

[0101] The present invention also relates to methods and compositions for staging and grading cancers. As already defined, staging relates to determining the extent of a cancer's spread, including its size and the degree to which other tissues, such as lymph nodes are involved in the cancer. Grading refers to the degree of a cell's retention of the characteristics of the tissue of its origin. A lower grade cancer comprises tumor cells that more closely resemble normal cells than a medium or higher grade cancer. Grading can be a useful diagnostic and prognostic tool. Higher grade cancers usually behave more aggressively than lower grade cancers. Thus, knowledge of the cancer grade, as well as its stage, can be a significant factor in the choice of the appropriate therapeutic intervention for the particular patient, e.g., surgery, radiation, chemotherapy, etc. Staging and grading can also be used in conjunction with a therapy to assess its efficacy, to determine prognosis, to determine effective dosages, etc.

[0102] Various methods of staging and grading cancers can be employed in accordance with the present invention. A “cell expression profile” or “cell expression fingerprint” is a representation of the expression of various different genes in a given cell or sample comprising cells. These cell expression profiles can be useful as reference standards. The cell expression fingerprints can be used alone for grading, or in combination with other grading methods.

[0103] The present invention also relates to methods and compositions for diagnosing a prostate cancer, or determining susceptibility to a prostate cancer, using polynucleotides, polypeptides, and specific-binding partners of the present invention to detect, assess, determine, etc., differentially-regulated genes of the present invention. In such methods, the gene can serve as a marker for prostate cancer, e.g., where the gene, when mutant, is a direct cause of the prostate cancer; where the gene is affected by another gene(s) which is directly responsible for the prostate cancer, e.g., when the gene is part of the same signaling pathway as the directly responsible gene; and, where the gene is chromosomally linked to the gene(s) directly responsible for the prostate cancer, and segregates with it. Many other situations are possible. To detect, assess, determine, etc., a probe specific for the gene can be employed as described above and below. Any method of detecting and/or assessing the gene can be used, including detecting expression of the gene using polynucleotides, antibodies, or other specific-binding partners.

[0104] The present invention relates to methods of diagnosing a disorder associated with prostate cancer, or determining a subject's susceptibility to such prostate cancer, comprising, e.g., assessing the expression of a differentially-regulated gene in a tissue sample comprising tissue or cells suspected of having the [(e.g., where the sample comprises prostate). The phrase “diagnosing” indicates that it is determined whether the sample has a prostate cancer cells. “Determining a subject's susceptibility to a prostate cancer” indicates that the subject is assessed for whether s/he is predisposed to get-such a disease or disorder, where the predisposition is indicated by abnormal expression of the gene (e.g., gene mutation, gene expression pattern is not normal, etc.). Predisposition or susceptibility to a disease may result when a such disease is influenced by epigenetic, environmental, etc., factors.

[0105] By the phrase “assessing expression of a differentially-regulated gene,” it is meant that the functional status of the gene is evaluated. This includes, but is not limited to, measuring expression levels of said gene, determining the genomic structure of said gene, determining the mRNA structure of transcripts from said gene, or measuring the expression levels of polypeptide coded for by said gene. Thus, the term “assessing expression” includes evaluating the all aspects of the transcriptional and translational machinery of the gene. For instance, if a promoter defect causes, or is suspected of causing, the disorder, then a sample can be evaluated (i.e., “assessed”) by looking (e.g., sequencing or restriction mapping) at the promoter sequence in the gene, by detecting transcription products (e.g., RNA), by detecting translation product (e.g., polypeptide). Any measure of whether the gene is functional can be used, including, polypeptide, polynucleotide, and functional assays for the gene's biological activity.

[0106] In making the assessment, it can be useful to compare the results to a normal gene, e.g., a gene which is not associated with the disorder. The nature of the comparison can be determined routinely, depending upon how the assessing is accomplished. If, for example, the mRNA levels of a sample is detected, then the mRNA levels of a normal can serve as a comparison, or a gene which is known not to be affected by the disorder. Methods of detecting mRNA are well known, and discussed above, e.g., but not limited to, Northern blot analysis, polymerase chain reaction (PCR), reverse transcriptase PCR, RACE PCR, etc. Similarly, if polypeptide production is used to evaluate the gene, then the polypeptide in a normal tissue sample can be used as a comparison, or, polypeptide from a different gene whose expression is known not to be affected by the disorder. These are only examples of how such a method could be carried out.

[0107] The genes and polypeptides of the present invention can be used to identify, detect, stage, determine the presence of, prognosticate, treat, study, etc., diseases and conditions of the prostate mentioned above. The present invention relates to methods of identifying a genetic basis for a disease or disease-susceptibility, comprising, e.g., determining the association of a prostate cancer or cancer-susceptibility with a gene of the present invention. An association between a disease or disease-susceptibility and nucleotide sequence includes, e.g., establishing (or finding) a correlation (or relationship) between a DNA marker (e.g., gene, VNTR, polymorphism, EST, etc.) and a particular disease state. Once a relationship is identified, the DNA marker can be utilized in diagnostic tests and as a drug target. Any region of the gene can be used as a source of the DNA marker, exons, introns, intergenic regions, etc.

[0108] Human linkage maps can be constructed to establish a relationship between a gene and prostate cancer. Typically, polymorphic molecular markers (e.g., STRP's, SNP's, RFLP's, VNTR's) are identified within the region, linkage and map distance between the markers is then established, and then linkage is established between phenotype and the various individual molecular markers. Maps can be produced for an individual family, selected populations, patient populations, etc. In general, these methods involve identifying a marker associated with the disease (e.g., identifying a polymorphism in a family which is linked to the disease) and then analyzing the surrounding DNA to identity the gene responsible for the phenotype. See, e.g., Kruglyak et al., Am. J. Hum. Genet., 58, 1347-1363, 1996; Matise et al., Nat. Genet., 6(4):384-90, 1994.

[0109] Assessing the effects of therapeutic and preventative interventions (e.g., administration of a drug, chemotherapy, radiation, etc.) on prostate cancer is a major effort in drug discovery, clinical medicine, and pharmacogenomics. The evaluation of therapeutic and preventative measures, whether experimental or already in clinical use, has broad applicability, e.g., in clinical trials, for monitoring the status of a patient, for analyzing and assessing animal models, and in any scenario involving cancer treatment and prevention. Analyzing the expression profiles of polynucleotides of the present invention can be utilized as a parameter by which interventions are judged and measured. Treatment of a disorder can change the expression profile in some manner which is prognostic or indicative of the drug's effect on it. Changes in the profile can indicate, e.g., drug toxicity, return to a normal level, etc. Accordingly, the present invention also relates to methods of monitoring or assessing a therapeutic or preventative measure (e.g., chemotherapy, radiation, anti-neoplastic drugs, antibodies, etc.) in a subject having prostate cancer, or, susceptible to such a disorder, comprising, e.g., detecting the expression levels of one or more differentially-regulated genes of the present invention. A subject can be a cell-based assay system, non-human animal model, human patient, etc. Detecting can be accomplished as described for the methods above and below. By “therapeutic or preventative intervention,” it is meant, e.g., a drug administered to a patient, surgery, radiation, chemotherapy, and other measures taken to prevent, treat, or diagnose prostate cancer.

[0110] Expression can be assessed in any sample comprising any tissue or cell type, body fluid, etc., as discussed for other methods of the present invention, including cells from prostate can be used, or cells derived from prostate. By the phrase “cells derived from prostate,” it is meant that the derived cells originate from prostate, e.g., when metastasis from a primary tumor site has occurred, when a progenitor-type or pluripotent cell gives rise to other cells, etc.

[0111] The present invention also relates to methods of using polypeptide binding partners, such as antibodies, to deliver active agents to the prostate for different purposes, including, e.g., for diagnostic, therapeutic (e.g., to treat prostate), and research purposes. Methods can involve delivering or administering an active agent to the prostate, comprising, e.g., administering to a subject in need thereof, an effective amount of an active agent coupled to a binding partner specific for human polypeptide selected from Tables 1 and 2, wherein said binding partner is effective to deliver said active agent specifically to prostate.

[0112] Any type of active agent can be used in combination, including, therapeutic, cytotoxic, cytostatic, chemotherapeutic, anti-neoplastic, anti-proliferative, anti-biotic, etc., agents. A chemotherapeutic agent can be, e.g., DNA-interactive agent, alkylating agent, antimetabolite, tubulin-interactive agent, hormonal agent, hydroxyurea, Cisplatin, Cyclophosphamide, Altretamine, Bleomycin, Dactinomycin, Doxorubicin, Etoposide, Teniposide, paclitaxel, cytoxan, 2-methoxycarbonylaminobenzimidazole, Plicamycin, Methotrexate, Fluorouracil, Fluorodeoxyuridin, CB3717, Azacitidine, Floxuridine, Mercapyopurine, 6-Thioguanine, Pentostatin, Cytarabine, Fludarabine, etc. Agents can also be contrast agents useful in imaging technology, e.g., X-ray, CT, CAT, MRI, ultrasound, PET, SPECT, and scintographic.

[0113] An active agent can be associated in any manner with a binding partner which is effective to achieve its delivery specifically to the target. Specific delivery or targeting indicates that th the active agent is in a liposome, or other carrier, and the binding partner is associated with the liposome surface. The binding partner can be oriented in such a way that it is able to bind to its target, e.g., on the cell surface. Methods for delivery of DNA via a cell-surface receptor is described, e.g., in U.S. Pat. No. 6,339,139.

[0114] Identifying Agent Methods

[0115] The present invention also relates to methods of identifying agents, and the agents themselves, which modulate prostate cancer genes. These agents can be used to modulate the biological activity of the polypeptide encoded for the gene, or the gene, itself. Agents which regulate the gene or its product are useful in variety of different environments, including as medicinal agents to treat or prevent disorders associated with prostate cancer genes and as research reagents to modify the function of tissues and cell.

[0116] Methods of identifying agents generally comprise steps in which an agent is placed in contact with the gene, transcription product, translation product, or other target, and then a determination is performed to assess whether the agent “modulates” the target. The specific method utilized will depend upon a number of factors, including, e.g., the target (i.e., is it the gene or polypeptide encoded by it), the environment (e.g., in vitro or in vivo), the composition of the agent, etc.

[0117] For modulating the expression of a prostate cancer gene, a method can comprise, in any effective order, one or more of the following steps, e.g., contacting a prostate cancer gene (e.g., in a cell population) with a test agent under conditions effective for said test agent to modulate the expression of the prostate cancer, and determining whether said test agent modulates said gene. An agent can modulate expression of a gene at any level, including transcription, translation, and/or perdurance of the nucleic acid (e.g., degradation, stability, etc.) in the cell.

[0118] For modulating the biological activity of prostate cancer polypeptides, a method can comprise, in any effective order, one or more of the following steps, e.g., contacting a polypeptide (e.g., in a cell, lysate, or isolated) with a test agent under conditions effective for said test agent to modulate the biological activity of said polypeptide, and determining whether said test agent modulates said biological activity.

[0119] Contacting a gene or polypeptide with the test agent can be accomplished by any suitable method and/or means that places the agent in a position to functionally control its expression or biological activity. Functional control indicates that the agent can exert its physiological effect on the gene or polypeptide through whatever mechanism it works. The choice of the method and/or means can depend upon the nature of the agent and the condition and type of environment in which the gene or polypeptide is presented, e.g., lysate, isolated, or in a cell population (such as, in vivo, in vitro, organ explants, etc.). For instance, if the cell population is an in vitro cell culture, the agent can be contacted with the cells by adding it directly into the culture medium. If the agent cannot dissolve readily in an aqueous medium, it can be incorporated into liposomes, or another lipophilic carrier, and then administered to the cell culture. Contact can also be facilitated by incorporation of agent with carriers and delivery molecules and complexes, by injection, by infusion, etc.

[0120] Agents can be directed to, or targeted to, any part of the polypeptide which is effective for modulating it. For example, agents, such as antibodies and small molecules, can be targeted to cell-surface, exposed, extracellular, ligand binding, functional, etc., domains of the polypeptide. Agents can also be directed to intracellular regions and domains, e.g., regions where the polypeptide couples or interacts with intracellular or intramembrane binding partners.

[0121] After the agent has been administered in such a way that it can gain access to the gene or polypeptide, it can be determined whether the test agent modulates the gene or polypeptide expression or biological activity. Modulation can be of any type, quality, or quantity, e.g., increase, facilitate, enhance, up-regulate, stimulate, activate, amplify, augment, induce, decrease, down-regulate, diminish, lessen, reduce, etc. The modulatory quantity can also encompass any value, e.g., 1%, 5%, 10%, 50%, 75%, 1-fold, 2-fold, 5-fold, 10-fold, 100-fold, etc. To modulate gene expression means, e.g., that the test agent has an effect on its expression, e.g., to effect the amount of transcription, to effect RNA splicing, to effect translation of the RNA into polypeptide, to effect RNA or polypeptide stability, to effect polyadenylation or other processing of the RNA, to effect post-transcriptional or post-translational processing, etc. To modulate biological activity means, e.g., that a functional activity of the polypeptide is changed in comparison to its normal activity in the absence of the agent. This effect includes, increase, decrease, block, inhibit, enhance, etc.

[0122] A test agent can be of any molecular composition, e.g., chemical compounds, biomolecules, such as polypeptides, lipids, nucleic acids (e.g., antisense to a polynucleotide sequence selected from Table 1 or 2), carbohydrates, antibodies, ribozymes, double-stranded RNA, aptamers, etc. For example, if a polypeptide to be modulated is a cell-surface molecule, a test agent can be an antibody that specifically recognizes it and, e.g., causes the polypeptide to be internalized, leading to its down regulation on the surface of the cell. Such an effect does not have to be permanent, but can require the presence of the antibody to continue the down-regulatory effect. Antibodies can also be used to modulate the biological activity a polypeptide in a lysate or other cell-free form. Antisense can also be used as test agents to modulate gene expression.

[0123] Markers The polynucleotides of the present invention can be used with other markers, especially prostate and prostate cancer markers to identity, detect, stage, diagnosis, determine, prognosticate, treat, etc., tissue, diseases and conditions, etc, of the prostate. Markers can be polynucleotides, polypeptides, antibodies, ligands, specific binding partners, etc.

[0124] A number of genes and gene products have been identified which are associated with prostate cancer metastasis and/or progression, e.g., PSA, KAII (shows decreased expression in metastatic cells; Dong et al., Science, 268:884-6, 1995), D44 isoforms (differentially-regulated during carcinoma progression; Noordzij et al., Clin. Cancer Res., 3:805-15, 1997), p53 (Effert et al., J. Urol., 150:257-61, 1993), Rb, CDKN2, E-cadherin, PTEN (Hamilton et al., Br. J Cancer, 82:1671-6, 2000; Dong et al., Clin. Cancer Res., 7:304-308, 2001), bcl-2, prostatic acid phosphatase (PAP), prostate specific membrane antigen (e.g., U.S. Pat. Nos. 5,538,866 and 6,107,090), Smad3 (e.g., Kang et al., Proc. Natl. Acad. Sci., 98:3018-3023, 2001), TGF-beta, and other oncogenes and tumor suppressor genes. See, also, Myers and Grizzle, Eur. Urol., 30:153-166, 1996, for other biomarkers associated with prostatic carcinoma, such as PCNA, p185-erbB-2, p180erbB-3, TAG-72, nm23-H1 and FASE. Such markers can be used in combination with the methods of the present invention to facilitate identifying, grading, staging, prognostication, etc, of conditions and diseases of the prostate.

[0125] Therapeutics

[0126] Selective polynucleotides, polypeptides, and specific-binding partners thereto, can be utilized in therapeutic applications, especially to treat prostate cancer. Useful methods include, but are not limited to, immunotherapy (e.g., using specific-binding partners to polypeptides), vaccination (e.g., using a selective polypeptide or a naked DNA encoding such polypeptide), protein or polypeptide replacement therapy, gene therapy (e.g., germ-line correction, antisense), etc.

[0127] Various immunotherapeutic approaches can be used. For instance, unlabeled antibody that specifically recognizes a tissue-specific antigen can be used to stimulate the body to destroy or attack the cancer, to cause down-regulation, to produce complement-mediated lysis, to inhibit cell growth, etc., of target cells which display the antigen, e.g., analogously to how c-erbB-2 antibodies are used to treat breast cancer. In addition, antibody can be labeled or conjugated to enhance its deleterious effect, e.g., with radionuclides and other energy emitting entitities, toxins, such as ricin, exotoxin A (ETA), and diphtheria, cytotoxic or cytostatic agents, immunomodulators, chemotherapeutic agents, etc. See, e.g., U.S. Pat. No. 6,107,090.

[0128] An antibody or other specific-binding partner can be conjugated to a second molecule, such as a cytotoxic agent, and used for targeting the second molecule to a tissue-antigen positive cell (Vitetta, E. S. et al., 1993, Immunotoxin therapy, in DeVita, Jr., V. T. et al., eds, Cancer: Principles and Practice of Oncology, 4th ed., J. B. Lippincott Co., Philadelphia, 2624-2636). Examples of cytotoxic agents include, but are not limited to, antimetabolites, alkylating agents, anthracyclines, antibiotics, anti-mitotic agents, radioisotopes and chemotherapeutic agents. Further examples of cytotoxic agents include, but are not limited to ricin, doxorubicin, daunorubicin, taxol, ethidium bromide, mitomycin, etoposide, tenoposide, vincristine, vinblastine, colchicine, dihydroxy anthracin dione, actinomycin D, 1-dehydrotestosterone, diptheria toxin, Pseudomonas exotoxin (PE) A, PE40, abrin, elongation factor-2 and glucocorticoid. Techniques for conjugating therapeutic agents to antibodies are well.

[0129] In addition to immunotherapy, polynucleotides and polypeptides can be used as targets for non-immunotherapeutic applications, e.g., using compounds which interfere with function, expression (e.g., antisense as a therapeutic agent), assembly, etc. RNA interference can be used in vivtro and in vivo to silence differentially-expressed genes when its expression contributes to a disease (but also for other purposes, e.g., to identify the gene's function to change a developmental pathway of a cell, etc.). See, e.g., Sharp and Zamore, Science, 287:2431-2433, 2001; Grishok et al., Science, 287:2494, 2001.

[0130] Delivery of therapeutic agents can be achieved according to any effective method, including, liposomes, viruses, plasmid vectors, bacterial delivery systems, orally, systemically, etc. Therapeutic agents of the present invention can be administered in any form by any effective route, including, e.g., oral, parenteral, enteral, intraperitoneal, topical, transdermal (e.g., using any standard patch), ophthalmic, intravenously, nasally, local, non-oral, such as aerosal, inhalation, subcutaneous, intramuscular, buccal, sublingual, rectal, vaginal, intra-arterial, and intrathecal, etc. They can be administered alone, or in combination with any ingredient(s), active or inactive.

[0131] In addition to therapeutics, per se, the present invention also relates to methods of treating prostate cancer showing altered expression of differentially-regulated genes of Tables 1 and 2, comprising, e.g., administering to a subject in need thereof a therapeutic agent which is effective for regulating expression of said genes and/or which is effective in treating said disease. The term “treating” is used conventionally, e.g., the management or care of a subject for the purpose of combating, alleviating, reducing, relieving, improving the condition of, etc., of a disease or disorder. By the phrase “altered expression,” it is meant that the disease is associated with a mutation in the gene, or any modification to the gene (or corresponding product) which affects its normal function. Thus, expression of a differentially-regulated gene refers to, e.g., transcription, translation, splicing, stability of the mRNA or protein product, activity of the gene product, differential expression, etc.

[0132] Any agent which “treats” the disease can be used. Such an agent can be one which regulates the expression of the gene. Expression refers to the same acts already mentioned, e.g. transcription, translation, splicing, stability of the mRNA or protein product, activity of the gene product, differential expression, etc. For instance, if the condition was a result of a complete deficiency of the gene product, administration of gene product to a patient would be said to treat the disease and regulate the gene's expression. Many other possible situations are possible, e.g., where the gene is aberrantly expressed, and the therapeutic agent regulates the aberrant expression by restoring its normal expression pattern.

[0133] Antisense

[0134] Antisense polynucleotide (e.g., RNA) can also be prepared from a polynucleotide according to the present invention, preferably an anti-sense to a sequence of Table 1 or 2. Antisense polynucleotide can be used in various ways, such as to regulate or modulate expression of the polypeptides they encode, e.g., inhibit their expression, for in situ hybridization, for therapeutic purposes, for making targeted mutations (in vivo, triplex, etc.) etc. For guidance on administering and designing anti-sense, see, e.g., U.S. Pat. Nos. 6,200,960, 6,200,807, 6,197,584, 6,190,869, 6,190,661, 6,187,587, 6,168,950, 6,153,595, 6,150,162, 6,133,246, 6,117,847, 6,096,722, 6,087,343, 6,040,296, 6,005,095, 5,998,383, 5,994,230, 5,891,725, 5,885,970, and 5,840,708. An antisense polynucleotides can be operably linked to an expression control sequence. A total length of about 35 bp can be used in cell culture with cationic liposomes to facilitate cellular uptake, but for in vivo use, preferably shorter oligonucleotides are administered, e.g. 25 nucleotides.

[0135] Antisense polynucleotides can comprise modified, nonnaturally-occurring nucleotides and linkages between the nucleotides (e.g., modification of the phosphate-sugar backbone; methyl phosphonate, phosphorothioate, or phosphorodithioate linkages; and 2′-O-methyl ribose sugar units), e.g., to enhance in vivo or in vitro stability, to confer nuclease resistance, to modulate uptake, to modulate cellular distribution and compartmentalization, etc. Any effective nucleotide or modification can be used, including those already mentioned, as known in the art, etc., e.g., disclosed in U.S. Pat. Nos. 6,133,438; 6,127,533; 6,124,445; 6,121,437; 5,218,103 (e.g., nucleoside thiophosphoramidites); 4,973,679; Sproat et al., “2′-O-Methyloligoribonucleotides: synthesis and applications,” Oligonucleotides and Analogs A Practical Approach, Eckstein (ed.), IRL Press, Oxford, 1991, 49-86; Iribarren et al., “2′O-Alkyl Oligoribonucleotides as Antisense Probes,” Proc. Natl. Acad. Sci. USA, 1990, 87, 7747-7751; Cotton et al., “2′-O-methyl, 2′-O-ethyl oligoribonucleotides and phosphorothioate oligodeoxyribonucleotides as inhibitors of the in vitro U7 snRNP-dependent mRNA processing event,” Nucl. Acids Res., 1991, 19, 2629-2635.

[0136] Arrays

[0137] The present invention also relates to an ordered array of polynucleotide probes and specific-binding partners (e.g., antibodies) for detecting the expression of differentially-regulated genes in a sample, comprising, one or more polynucleotide probes or specific binding partners associated with a solid support, wherein each probe is specific for said genes, and the probes comprise nucleotide sequences selected from Table 1 and 2 which is specific for said gene, a nucleotide sequence having sequence identity to polynucleotide of Table 1 or 2 which is specific for said gene or polynucleotide, or complements thereto, or a specific-binding partner which is specific for said genes.

[0138] The phrase “ordered array” indicates that the probes are arranged in an identifiable or position-addressable pattern, e.g., such as the arrays disclosed in U.S. Pat. Nos. 6,156,501, 6,077,673, 6,054,270, 5,723,320, 5,700,637, WO09919711, WO00023803. The probes are associated with the solid support in any effective way. For instance, the probes can be bound to the solid support, either by polymerizing the probes on the substrate, or by attaching a probe to the substrate. Association can be, covalent, electrostatic, noncovalent, hydrophobic, hydrophilic, noncovalent, coordination, adsorbed, absorbed, polar, etc. When fibers or hollow filaments are utilized for the array, the probes can fill the hollow orifice, be absorbed into the solid filament, be attached to the surface of the orifice, etc. Probes can be of any effective size, sequence identity, composition, etc., as already discussed.

[0139] Ordered arrays can further comprise polynucleotide probes or specific-binding partners which are specific for other genes, including genes specific for prostate or disorders associated with prostate, such as prostate cancer.

[0140] Transgenic Animals

[0141] The present invention also relates to transgenic animals comprising differentially-regulated No. 6,242,667). The term “gene” as used herein includes any part of a gene, i.e., regulatory sequences, promoters, enhancers, exons, introns, coding sequences, etc. The nucleic acid present in the construct or transgene can be naturally-occurring wild-type, polymorphic, or mutated. Where the animal is a non-human animal, its homolog can be used instead. Transgenic animals can be susceptible to prostate cancer.

[0142] Along these lines, polynucleotides of the present invention can be used to create transgenic animals, e.g. a non-human animal, comprising at least one cell whose genome comprises a functional disruption of a differentially-regulated gene (e.g., a mouse homolog when a mouse is used). By the phrases “functional disruption” or “functionally disrupted,” it is meant that the gene does not express a biologically-active product. It can be substantially deficient in at least one functional activity coded for by the gene. Expression of a polypeptide can be substantially absent, i.e., essentially undetectable amounts are made. However, polypeptide can also be made, but which is deficient in activity, e.g., where only an amino-terminal portion of the gene product is produced. The transgenic animal can comprise one or more cells. When substantially all its cells contain the engineered gene, it can be referred to as a transgenic animal “whose genome comprises” the engineered gene. This indicates that the endogenous gene loci of the animal has been modified and substantially all cells contain such modification.

[0143] Functional disruption of the gene can be accomplished in any effective way, including, e.g., introduction of a stop codon into any part of the coding sequence such that the resulting polypeptide is biologically inactive (e.g., because it lacks a catalytic domain, a ligand binding domain, etc.), introduction of a mutation into a promoter or other regulatory sequence that is effective to turn it off, or reduce transcription of the gene, insertion of an exogenous sequence into the gene which inactivates it (e.g., which disrupts the production of a biologically-active polypeptide or which disrupts the promoter or other transcriptional machinery), deletion of sequences from the a differentially-regulated gene, etc. Examples of transgenic animals having functionally disrupted genes are well known, e.g., as described in U.S. Pat. Nos. 6,239,326, 6,225,525, 6,207,878, 6,194,633, 6,187,992, 6,180,849, 6,177,610, 6,100,445, 6,087,555, 6,080,910, 6,069,297, 6,060,642, 6,028,244, 6,013,858, 5,981,830, 5,866,760, 5,859,314, 5,850,004, 5,817,912, 5,789,654, 5,777,195, and 5,569,824. A transgenic animal which comprises the functional disruption can also be referred to as a “knock-out” animal, since the biological activity of its a differentially-regulated gene has been “knocked-out.” Knock-outs can be homozygous or heterozygous.

[0144] For creating functional disrupted genes, and other gene mutations, homologous recombination technology is of special interest since it allows specific regions of the genome to be targeted. Using homologous recombination methods, genes can be specifically-inactivated, specific mutations can be introduced, and exogenous sequences can be introduced at specific sites. These methods are well known in the art, e.g., as described in the patents above. See, also, Robertson, Biol. Reproduc., 44(2):238-245, 1991. Generally, the genetic engineering is performed in an embryonic stem (ES) cell, or other pluripotent cell line (e.g., adult stem cells, EG cells), and that genetically-modified cell (or nucleus) is used to create a whole organism. Nuclear transfer can be used in combination with homologous recombination technologies.

[0145] For example, a differentially-regulated gene locus can be disrupted in mouse ES cells using a positive-negative selection method (e.g., Mansour et al., Nature, 336:348-352, 1988). In this method, a targeting vector can be constructed which comprises a part of the gene to be targeted. A selectable marker, such as neomycin resistance genes, can be inserted into a a differentially-regulated gene exon present in the targeting vector, disrupting it. When the vector recombines with the ES cell genome, it disrupts the function of the gene. The presence in the cell of the vector can be determined by expression of neomycin resistance. See, e.g., U.S. Pat. No. 6,239,326. Cells having at least one functionally disrupted gene can be used to make chimeric and germline animals, e.g., animals having somatic and/or germ cells comprising the engineered gene. Homozygous knock-out animals can be obtained from breeding heterozygous knock-out animals. See, e.g., U.S. Pat. No. 6,225,525.

[0146] A transgenic animal, or animal cell, lacking one or more functional differentially-regulated genes can be useful in a variety of applications, including, as an animal model for cancer, for drug screening assays, as a source of tissues deficient in said gene activity, and any of the utilities mentioned in any issued U.S. patent on transgenic animals, including, U.S. Pat. Nos. 6,239,326, 6,225,525, 6,207,878, 6,194,633, 6,187,992, 6,180,849, 6,177,610, 6,100,445, 6,087,555, 6,080,910, 6,069,297, 6,060,642, 6,028,244, 6,013,858, 5,981,830, 5,866,760, 5,859,314, 5,850,004, 5,817,912, 5,789,654, 5,777,195, and 5,569,824.

[0147] The present invention also relates to non-human, transgenic animal whose genome comprises recombinant a differentially-regulated gene nucleic acid operatively linked to an expression control sequence effective to express said coding sequence, e.g., in prostate. such a transgenic animal can also be referred to as a “knock-in” animal since an exogenous gene has been introduced, stably, into its genome.

[0148] A recombinant a differentially-regulated gene nucleic acid refers to a gene which has been introduced into a target host cell and optionally modified, such as cells derived from animals, plants, bacteria, yeast, etc. A recombinant a differentially-regulated gene includes completely synthetic nucleic acid sequences, semi-synthetic nucleic acid sequences, sequences derived from natural sources, and chimeras thereof. “Operable linkage” has the meaning used through the specification, i.e., placed in a functional relationship with another nucleic acid. When a gene is operably linked to an expression control sequence, as explained above, it indicates that the gene (e.g., coding sequence) is joined to the expression control sequence (e.g., promoter) in such a way that facilitates transcription and translation of the coding sequence. As described above, the phrase “genome” indicates that the genome of the cell has been modified. In this case, the recombinant a differentially-regulated gene has been stably integrated into the genome of the animal. The a differentially-regulated gene nucleic acid in operable linkage with the expression control sequence can also be referred to as a construct or transgene.

[0149] Any expression control sequence can be used depending on the purpose. For instance, if selective expression is desired, then expression control sequences which limit its expression can be selected. These include, e.g., tissue or cell-specific promoters, introns, enhancers, etc. For various methods of cell and tissue-specific expression, see, e.g., U.S. Pat. Nos. 6,215,040, 6,210,736, and 6,153,427. These also include the endogenous promoter, i.e., the coding sequence can be operably linked to its own promoter. Inducible and regulatable promoters can also be utilized.

[0150] The present invention also relates to a transgenic animal which contains a functionally disrupted and a transgene stably integrated into the animals genome. Such an animal can be constructed using combinations any of the above- and below-mentioned methods. Such animals have any of the aforementioned uses, including permitting the knock-out of the normal gene and its replacement with a mutated gene. Such a transgene can be integrated at the endogenous gene locus so that the functional disruption and “knock-in” are carried out in the same step.

[0151] In addition to the methods mentioned above, transgenic animals can be prepared according to known methods, including, e.g., by pronuclear injection of recombinant genes into pronuclei of 1-cell embryos, incorporating an artificial yeast chromosome into embryonic stem cells, gene targeting methods, embryonic stem cell methodology, cloning methods, nuclear transfer methods. See, also, e.g., U.S. Pat. Nos. 4,736,866; 4,873,191; 4,873,316; 5,082,779; 5,304,489; 5,174,986; 5,175,384; 5,175,385; 5,221,778; Gordon et al., Proc. Natl. Acad. Sci., 77:7380-7384, 1980; Palmiter et al., Cell, 41:343-345, 1985; Palmiter et al., Ann. Rev. Genet., 20:465-499, 1986; Askew et al., Mol. Cell. Bio., 13:4115-4124, 1993; Games et al. Nature, 373:523-527, 1995; Valancius and Smithies, Mol. Cell. Bio., 11:1402-1408, 1991; Stacey et al., Mol. Cell. Bio., 14:1009-1016, 1994; Hasty et al., Nature, 350:243-246, 1995; Rubinstein et al., Nucl. Acid Res., 21:2613-2617,1993; Cibelli et al., Science, 280:1256-1258, 1998. For guidance on recombinase excision systems, see, e.g., U.S. Pat. Nos. 5,626,159, 5,527,695, and 5,434,066. See also, Orban, P.C., et al., “Tissue- and Site-Specific DNA Recombination in Transgenic Mice,” Proc. Natl. Acad. Sci. USA, 89:6861-6865 (1992); O'Gorman, S., et al., “Recombinase-Mediated Gene Activation and Site-Specific Integration in Mammalian Cells,” Science, 251:1351-1355 (1991); Sauer, B., et al., “Cre-stimulated recombination at 1oxP-Containing DNA sequences placed into the mammalian genome,” Polynucleotides Research, 17(l):147-161 (1989); Gagneten, S. et al. (1997) Nucl. Acids Res. 25:3326-3331; Xiao and Weaver (1997) Nucl. Acids Res. 25:2985-2991; Agah, R. et al. (1997) J. Clin. Invest. 100:169-179; Barlow, C. et al. (1997) Nucl. Acids Res. 25:2543-2545; Araki, K. et al. (1997) Nucl. Acids Res. 25:868-872; Mortensen, R. N. et al. (1992) Mol. Cell. Biol. 12:2391-2395 (G418 escalation method); Lakhlani, P. P. et al. (1997) Proc. Natl. Acad. Sci. USA 94:9950-9955 (“hit and run”); Westphal and Leder (1997) Curr. Biol. 7:530-533 (transposon-generated “knock-out” and “knock-in”); Templeton, N. S. et al. (1997) Gene Ther. 4:700-709 (methods for efficient gene targeting, allowing for a high frequency of homologous recombination events, e.g., without selectable markers); PCT International Publication WO 93/22443 (functionally-disrupted).

[0152] A polynucleotide according to the present invention can be introduced into any non-human animal, including a non-human mammal, mouse (Hogan et al., Manipulating the Mouse Embryo: A Laboratory Manual, Cold Spring Harbor Laboratory, Cold Spring Harbor, New York, 1986), pig (Hammer et al., Nature, 315:343-345, 1985), sheep (Hammer et al., Nature, 315:343-345, 1985), cattle, rat, or primate. See also, e.g., Church, 1987, Trends in Biotech. 5:13-19; Clark et al., Trends in Biotech. 5:20-24, 1987); and DePamphilis et al., BioTechniques, 6:662-680, 1988. Transgenic animals can be produced by the methods described in U.S. Pat. No. 5,994,618, and utilized for any of the utilities described therein.

[0153] Database

[0154] The present invention also relates to electronic forms of polynucleotides, polypeptides, etc., of the present invention, including computer-readable medium (e.g., magnetic, optical, etc., stored in any suitable format, such as flat files or hierarchical files) which comprise such sequences, or fragments thereof, e-commerce-related means, etc. Along these lines, the present invention relates to methods of retrieving gene sequences from a computer-readable medium, comprising, one or more of the following steps in any effective order, e.g., selecting a cell or gene expression profile, e.g., a profile that specifies that said gene is differentially expressed in prostate cancer, and retrieving said differentially expressed gene sequences, where the gene sequences consist of the genes represented by Table 1.

[0155] A “gene expression profile” means the list of tissues, cells, etc., in which a defined gene is expressed (i.e, transcribed and/or translated). A “cell expression profile” means the genes which are expressed in the particular cell type. The profile can be a list of the tissues in which the gene is expressed, but can include additional information as well, including level of expression (e.g., a quantity as compared or normalized to a control gene), and information on temporal (e.g., at what point in the cell-cycle or developmental program) and spatial expression. By the phrase “selecting a gene or cell expression profile,” it is meant that a user decides what type of gene or cell expression pattern he is interested in retrieving, e.g., he may require that the gene is differentially expressed in a tissue, or he may require that the gene is not expressed in blood, but must be expressed in prostate cancer. Any pattern of expression preferences may be selected. The selecting can be performed by any effective method. In general, “selecting” refers to the process in which a user forms a query that is used to search a database of gene expression profiles. The step of retrieving involves searching for results in a database that correspond to the query set forth in the selecting step. Any suitable algorithm can be utilized to perform the search query, including algorithms that look for matches, or that perform optimization between query and data. The database is information that has been stored in an appropriate storage medium, having a suitable computer-readable format. Once results are retrieved, they can be displayed in any suitable format, such as HTML.

[0156] For instance, the user may be interested in identifying genes that are differentially expressed in a prostate cancer. He may not care whether small amounts of expression occur in other tissues, as long as such genes are not expressed in peripheral blood lymphocytes. A query is formed by the user to retrieve the set of genes from the database having the desired gene or cell expression profile. Once the query is inputted into the system, a search algorithm is used to interrogate the database, and retrieve results.

[0157] Advertising, Licensing, etc., Methods

[0158] The present invention also relates to methods of advertising, licensing, selling, purchasing, brokering, etc., genes, polynucleotides, specific-binding partners, antibodies, etc., of the present invention. Methods can comprises, e.g., displaying a a differentially-regulated gene gene, a differentially-regulated gene polypeptide, or antibody specific for a differentially-regulated gene in a printed or computer-readable medium (e.g., on the Web or Internet), accepting an offer to purchase said gene, polypeptide, or antibody.

[0159] Other

[0160] A polynucleotide, probe, polypeptide, antibody, specific-binding partner, etc., according to the present invention can be isolated. The term “isolated” means that the material is in a form in which it is not found in its original environment or in nature, e.g., more concentrated, more purified, separated from component, etc. An isolated polynucleotide includes, e.g., a polynucleotide having the sequenced separated from the chromosomal DNA found in a living animal, e.g., as the complete gene, a transcript, or a cDNA. This polynucleotide can be part of a vector or inserted into a chromosome (by specific gene-targeting or by random integration at a position other than its normal position) and still be isolated in that it is not in a form that is found in its natural environment. A polynucleotide, polypeptide, etc., of the present invention can also be substantially purified. By substantially purified, it is meant that polynucleotide or polypeptide is separated and is essentially free from other polynucleotides or polypeptides, i.e., the polynucleotide or polypeptide is the primary and active constituent. A polynucleotide can also be a recombinant molecule. By “recombinant,” it is meant that the polynucleotide is an arrangement or form which does not occur in nature. For instance, a recombinant molecule comprising a promoter sequence would not encompass the naturally-occurring gene, but would include the promoter operably linked to a coding sequence not associated with it in nature, e.g., a reporter gene, or a truncation of the normal coding sequence.

[0162] The term “marker” is used herein to indicate a means for detecting or labeling a target. A marker can be a polynucleotide (usually referred to as a “probe”), polypeptide (e.g., an antibody conjugated to a detectable label), PNA, or any effective material.

[0163] The topic headings set forth above are meant as guidance where certain information can be found in the application, but are not intended to be the only source in the application where information on such topic can be found.

[0164] Reference Materials

[0165] For other aspects of the polynucleotides, reference is made to standard textbooks of molecular biology. See, e.g., Hames et al., Polynucleotide Hybridization, IL Press, 1985; Davis et al., Basic Methods in Molecular Biology, Elsevir Sciences Publishing, Inc., New York, 1986; Sambrook et al., Molecular Cloning, CSH Press, 1989; Howe, Gene Cloning and Manipulation, Cambridge University Press, 1995; Ausubel et al., Current Protocols in Molecular Biology, John Wiley & Sons, Inc., 1994-1998.

[0166] Without further elaboration, it is believed that one skilled in the art can, using the preceding description, utilize the present invention to its fullest extent. The preceding preferred specific embodiments are, therefore, to be construed as merely illustrative, and not limiting the remainder of the disclosure in any way whatsoever. The entire disclosure of all applications, patents and publications, cited above and in the figures are hereby incorporated by reference in their entirety.

TABLE 1

| | GI# | NM | classification | domain | description | Score | E | seq-f | seq-t |
|---|---|---|---|---|---|---|---|---|---|
| PCP0744 | 4505674 | NM_002606 | Unknown | 4505674\|ref\|NM_002606.1 Homo sapiens phosphodiesterase 9A (PDE91), mRNA | | | | | |
| 1, 2 | 4505674 | | | PDEaae | 3′5′-cyclic nucleotide phosphodiester | 225.9 | 1.30E−79 | 311 | 533 |
| | 4505674 | | | HD | HD domain | −10.5 | 0.52 | 313 | 426 |
| | 4505674 | | | gntR | Bacterial regulatory proteins, gntR f | 3.4 | 0.92 | 136 | 150 |
| PCP0729 | 11640556 | NM_014367 | Unknown | 11640556\|gb\|AF107495.1\|AF107495 Homo sapiens FWP001 and putative FWP0022 mRNA, | | | | | |
| 3, 4 | 11640556 | | | complete cds. and 6457343\|gb\|AF191020.1\|AF191020 Homo sapiens E21G5 | | | | | |
| | | | | (E21G5) mRNA, complete cds. and 9295191\|gb\|AF201944.1\|AF201944 Homo sapiens | | | | | |
| | | | | HGTD-P (HGTD-P) | | | | | |
| | | | | mRNA, complete cds. | | | | | |
| | 11640556 | | | | | | | | |
| PCP0861 | 12005804 | AF253979 | Unknown | 12005804 AF253979 Homo sapiens DC24 mRNA, complete cds | | | | | |
| 5, 6 | 12005804 | | | oxidored ql | NADH-Ubiquinone/plastiquinone | 22.9 | 9.30E−07 | 82 | 108 |
| PCP0865 | 5138913 | AF092132 | Unknown | 5138913\|gb\|AF092132.1\|AF092132 Homo sapiens PAK2 mRNA, complete cds. Also: serine | | | | | |
| | | | | kinase (hPAK65) mRNA | | | | | |
| 7, 8 | 5138913 | | | pkinase | Protein kinase domain | 284 | 9.90E−83 | 280 | 516 |
| | 5138913 | | | PBD | P21-Rho-binding domain | 120.4 | 1.80E−33 | 69 | 129 |

| PCP0731 | 10436287 | NM_022151 | Unknown | 10436287\|dbj\|AK024029.1\|AK024029 H sapiens cDNA FLJ13967 fis, clone Y79AA1001402, | | | | | |
|---|---|---|---|---|---|---|---|---|---|
| 9, 10 | 10436287 | | | weakly similar to H sapiens paraneoplastic cancer-testis-brain antigen (MA4) mRNA | | | | | |
| PCP0456 | 5209326 | NM_001634 | Unknown | 5209326\|ref\|NM_001634.3 Homo sapiens S-adenosylmethionine decarboxylase 1 (AMD1); | | | | | |
| | | | | XM_002078.3\| H. sapiens death associated protein 3 (DAP: | | | | | |
| 11, 12 | 5209326 | | | SAM decarbox | Adenosylmethionine decarboxylase | 656 | 1.00E−194 | 1 | 329 |

| PCP0660 | 10439870 | AK026903 | Unknown | 10439870\|db\|AK026903.1\|AK026903 Homo sapiens cDNA: FLJ23250 fis, clone COL0421 | | | | | |
|---|---|---|---|---|---|---|---|---|---|
| 13, 14 | 10439870 | | | Transposase 11 | Tansposase DDE domain | 139.5 | 3.20E−39 | 91 | 331 |
| PCP0389 | 11418710 | NM_014702 | Unknown | 11418710\|ref\|XM_004363.1\| Homo sapiens KIAA0408 gene product (KIAA0408), mRNA | | | | | |
| 15, 16 | 11418710 | | | | | | | | |
| PCP0590 | 12805036 | NM_024116 | Unknown | 12805036\|gbp\|BC001972.1\|BC001972 Homo sapiens, clone MGC:5306, mRNA, complete cds. | | | | | |
| 17, 18 | 12805036 | | | EST: 13580275\|gb\|BG572622.1\|BG572622 602593719F1 NIH_MGC_79 Homo sapiens cDNA | | | | | |
| | | | | clone IMAGE:4720900 5′ (plus/plus) | | | | | |
| PCP0651 | 13111807 | NM_001634 | Unknown | 13111807\|gb\|BC000171.2\|BC000171 H sapiens, S-adenosylmethionine decarboxylase 1, | | | | | |
| | | | | clone MGC:5213 mRNA, complete cds | | | | | |
| 19, 20 | 13111807 | | | SAM decarbox | Adenosylmethionine decarboxylase | 661.3 | 2.70E− | 1 | 329 |
| | | | | | | | 196 | | |
| PCP0471 | 4877277 | NM_004189 | Unknown | 4877277/AJ006230.1\|HSA6230 Homo sapiens sox-14 gene | | | | | |
| 21, 22 | 4877277 | | | HMG box | HMG (high mobility group) box | 130.1 | 2.10E−36 | 8 | 76 |
| PCP0716 | 311625 | NM_003248 | Secreted | 311625\|emb\|Z19585.1\|HSTHROMB4 H.sapiens mRNA for thromobospondin-4. EST (OriGene): | | | | | |
| | | | | BC1026 D12 E03 019.b1 (plus/minus) | | | | | |
| 23, 24 | 311625 | | | TSPN | Thrombospondin N-terminal -like domai | 205.5 | 4.20E−59 | 24 | 192 |
| | 311625 | | | tsp 3 | Thrombospondin type 3 repeat | 147.2 | 1.50E−41 | 706 | 718 |
| | 311625 | | | EGF | EGF-like domain | 37.1 | 2.10E−08 | 424 | 461 |
| | 311625 | | | ET | ET module | −33.2 | 0.14 | 353 | 430 |
| | 311625 | | | TIL | Trypsin Inhibitor like cysteine rich | −11.8 | 0.25 | 261 | 330 |
| | 311625 | | | laminin EGF | Laminin EGF-like (Domains III and V) | −14.5 | 0.47 | 289 | 324 |
| PCP0570 | 7019348 | NM_013372 | Secreted | 7019348\|ref\|NM_013372.1\| Homo sapiens cysteine knot superfamily 1, | | | | | |
| | | | | BMP antagonist 1 (CKTSF1B1), mRNA | | | | | |
| 25, 26 | 7019348 | | | DAN | DAN domain | 275.5 | 3.50E−80 | 58 | 184 |
| | 7019348 | | | TGF-beta | Transforming growth factor beta like dom | −31.5 | 0.092 | 91 | 179 |
| | 7019348 | | | HTH 6 | Helix-turn-helix domain, rpiR family | −40.3 | 0.68 | 68 | 152 |
| | 7019348 | | | PTN MK | PTN/MK heparin-binding protein family | −62.2 | 0.81 | 1 | 138 |
| PCP0624 | 1213612 | NM_006061 | Secreted | 1213612\|emb\|X94323.1\|HSSPG28 H. sapiens mRNA for SGP28 protein (specific | | | | | |
| | | | | granule protein (28 kDa); cysteine-rich secretory protein-3 (SGP28)) | | | | | |
| 27, 28 | 1213612 | | | SCP | SCP-like extracellular protein | 290.5 | 1.10E−84 | 4 | 179 |
| | 1213612 | | | Antistasin | Antistasin family | 3.3 | 0.39 | 216 | 240 |
| | 1213612 | | | TIL | Trypsin Inhibitor like cysteine rich | −17.2 | 0.72 | 184 | 238 |
| PCP0688 | 6425047 | AP188747 | Secreted | 6425047\|gb\|AF188747.1\|AF188747 Homo sapiens prostrate kallikrein 2 (KLK2) mRNA, | | | | | |
| | | | | alternatively spliced, complete cds | | | | | |
| 29, 30 | 6425047 | | | trypsin | Trypsin | 185.7 | 2.00E−59 | 25 | 209 |
| PCP0556 | 12730727 | NM_017423 | Secreted | 12730727\|ref\|XM_003527.2\| Homo sapiens UDP-N-acetyl-alpha-D-galactosamine:polypeptide | | | | | |
| 31, 32 | 12730727 | | | N-acetylgalactosaminyltransferase 7 (GaINac-T7 (GALNT7), mRNA. EST: 9793644\|gb\| | | | | | |
| | | | | BE551952.1\|BE551952 hy01f0.6x1 NCI_CGAP_GC6 Homo sapiens cDNA clone | | | | | |
| | | | | IMAGE:3196067 3′ (plus/minus) | | | | | |
| | 12730727 | | | Glycos transf 2 | Glycosyl transferase | 98.7 | 6.10E−27 | 210 | 1399 |
| | 12730727 | | | Ricin B lectin | QXW lectin repeat | 43.9 | 1.90E−10 | 617 | 652 |
| | 12730727 | | | SCP | SCP-like extracellular protein | 7.1 | 0.036 | 454 | 488 |
| PCP0497 | 13652850 | NM_001648 | Secreted | 13652850\|ref\|XM_008995.2\| Homo sapiens kallikrein 3, (prostate specific antigen) (KLK3), | | | | | |
| | | | | mRNA | | | | | |
| 33, 34 | 13652850 | | | trypsin | Trypsin | 272.6 | 5.10E−87 | 25 | 253 |
| PCP0751 | 14422306 | AJ310938 | Secreted | 14422306\|emb\|AJ310938.1\|HSA310938.1 Homo sapiens mRNA for prepro PSA-RP2 | | | | | |
| | | | | (KLK3 gene), transcript 2. (kallikrein 3, (KLK3 | | | | | |
| 35, 36 | 14422306 | | | trypsin | Trypsin | 132.6 | 1.50E−42 | 25 | 158 |
| PCP0560 | 341200 | N24543 | Secreted | 341200\|gb\|M24543.1\|HUMPSANTIG Human prostate-specific antigen (PA) gene, complete cds. | | | | | |
| 37 | 341200 | | | 35720\|emb\|X07730.1\|HSPSA Human mRNA for prostrate specific antigen (kallikrein 3) | | | | | |
| | 341200 | | | trypsin | Trypsin | 264.3 | 2.10E−84 | 23 | 254 |
| PCP0632 | 6694277 | NM_014141 | Secreted | 6694277\|gb\|AF193613.1\|AF193613 Homo sapiens cell recognition molecule Caspr2 | | | | | |
| | | | | (CASPR2) mRNA, complete | | | | | |
| 38, 39 | 6694277 | | | F5 F8 type C | F5/8 C domain | 216.5 | 2.00E−62 | 38 | 178 |
| | 6694277 | | | laminin G | Laminin G domain | 180.1 | 1.50E−51 | 1055 | 1185 |
| | 6694277 | | | EGF | EGF-like domain | 48.5 | 7.50E−12 | 967 | 1001 |
| | 6694277 | | | COLF1 | Fibrillar collagen C-terminal domain | 5.5 | 0.0062 | 611 | 632 |
| | 6694277 | | | fibrinogen C | Fibrinogen beta and gamma chains, C-t | 2.2 | 0.56 | 606 | 635 |
| | 6694277 | | | Metallothio 2 | Metallothionein | −37 | 0.96 | 690 | 745 |
| | 6694277 | | | TSPN | Thrombospondin N-terminal -like domai | −63 | 0.96 | 352 | 528 |
| PCP0402 | 13529043 | NM_001648 | Secreted | 13529043\|gb\|BC005307.1\|BC005307 Homo sapiens, kallikrein 3, (prostate specific antigen), clone | | | | | |
| 40, 41 | 13529043 | | | trypsin | Trypsin | 272.6 | 5.10E−87 | 25 | 253 |
| PCP0421 | 13653145 | NM_013372 | Secreted | 13653145\|ref\|XM_007593.3\| Homo sapiens cysteine knot superfamily 1, BMP antagnoist 1 | | | | | |
| 42, 43 | 13653145 | | | DAN | DAN domain | 243.3 | 1.70E−70 | 1 | 117 |
| | 13653145 | | | TGF-beta | Transforming growth factor beta like dom | −31.5 | 0.092 | 24 | 112 |
| | 13653145 | | | HTH 6 | Helix-turn-helix domain, rpiR family | −40.3 | 0.68 | 1 | 85 |
| PCP0576 | 13643135 | NM_006061 | Secreted | 13643135\|ref\|XM_004475.3\| Homo sapiens specific granule protein (28 kDa): | | | | | |
| | | | | cystein-rich secretory protein-3 (SGP28), mRNA | | | | | |
| 44, 45 | 13643135 | | | SCP | SCP-like extracellular protein | 287.1 | 1.10E−83 | 4 | 179 |
| | 13643135 | | | Antistasin | Antistasin family | 3.3 | 0.39 | 216 | 240 |
| | 13643135 | | | TIL | Trypsin Inhibitor like cysteine rich | −17.2 | 0.72 | 184 | 238 |
| PCP0486 | 1770465 | XM_167894 | Nuclear | 1770465\|emb\|X98259.1\|HSMPP8 H.sapiens mRNA for M-phase phosphoprotein, mpp8 | | | | | |
| 46, 47 | 1770465 | | | | | | | | |
| PCP0858 | 35569 | NM_002568 | Nuclear | 35569 Y00345.1\|HSPOLYAB Human mRNA for polyA binding protein | | | | | |
| 48, 49 | 35569 | | | rrm | RNA recognition motif (a.k.a. RRM,R | 373.3 | 1.30E− | 293 | 362 |
| | | | | | | | 109 | | |
| | 35569 | | | PABP | Poly-adenylate binding protein, uniqu | 168.6 | 5.30E−48 | 540 | 611 |
| PCP0404 | 298110 | NM_000123 | Nuclear | 298110\|emb\|X69978.1\|HSXPGAA H.sapiens mRNA for XP-G factor | | | | | |
| 50, 51 | 298110 | | | XPG-N | XPG N-terminal domain | 197.7 | 9.30E−57 | 1 | 98 |
| | 298110 | | | XPG I | XPG I-region | 167.1 | 1.60E−47 | 777 | 865 |
| | 298110 | | | DNA po13 beta | DNA polymerase III beta subunit, N-tc | 6.5 | 0.12 | 383 | 403 |
| | 298110 | | | Ribosomal S21 | Ribosomal protein S21 | −17.7 | 0.38 | 1038 | 1082 |
| PCP0457 | 435422 | NM_002015 | Nuclear | 435422\|gb\|U02310.1\|HSU02310 Human fork head domain protein (FKHR) mRNA, complete cds | | | | | |
| 52, 53 | 435422 | | | Fork head | Fork head domain | 87.8 | 1.10E−23 | 122 | 242 |
| | 435422 | | | X | Trans-activation protein X | 1.3 | 0.41 | 56 | 76 |
| | 435422 | | | 60s ribosomal | 60s Acidic ribosomal protein | 1.5 | 0.91 | 76 | 102 |
| PCP0859 | 560622 | NM_001788 | Nuclear | 560622 S72008 hCDC10=DC10 homolog [human, fetal lung, mRNA, 2314 nt] | | | | | |
| 54, 55 | 560622 | | | GTP CDC | Cell division protein | 589.9 | 8.10E− | 28 | 304 |
| | | | | | | | 175 | | |
| | 560622 | | | M | M protein | 15.2 | 0.083 | 366 | 386 |
| | 560622 | | | Ribosomal L36 | Ribosomal protein L36 | 5 | 0.13 | 344 | 380 |
| | 560622 | | | STAT | STAT protein, all-alpha domain | −65.7 | 0.21 | 256 | 401 |
| | 560622 | | | Arginosuc synth | Arginosuccinate synthase | 0.7 | 0.65 | 5 | 25 |
| | 560622 | | | ATP-bind | Conserved hypothetical ATP binding pr | −135.9 | 0.69 | 33 | 229 |
| | 560622 | | | ras | Ras family | −142 | 0.77 | 33 | 187 |
| PCP0654 | 4008100 | AF107043 | Nuclear | 4008100\|gb\|AF107043.1\|AF107043 Homo sapiens clone pCL11 DNA-binding protein SOX14 | | | | | |
| | | | | (SOX14) gene, complete cds | | | | | |
| 56, 57 | 4008100 | | | HMG box | HMG (high mobility group) box | 130.1 | 2.10E−36 | 8 | 76 |
| PCP0514 | 4504444 | NM_002136 | Nuclear | 4504444\|ref\|NM_002136.1\| Homo sapiens heterogeneous nuclear ribonucleoprotein A1 | | | | | |
| 58, 59 | 4504444 | | | (HNRPA1), mRNA (and gb\|U00947.1\|U00947 Human clone C4E 3.2 (CAC)n/(GTG)n | | | | | |
| | | | | repeat-containing mRNA) | | | | | |
| | 4504444 | | | rrm | RNA recognition motif. (a.k.a. RRM, R | 178.9 | 4.20E−51 | 107 | 177 |
| PCP0679 | 4557448 | NM_001271 | Nuclear | 4557448\|ref\|NM_001271.1 Homo sapiens chromodomain helicase DNA binding proteint 2 | | | | | |
| | | | | (CHD2), mRNA | | | | | |
| 60, 61 | 4557448 | | | SNF2 N | SNF2 and others N-terminal domain | 474 | 6.40E− | 487 | 768 |
| | | | | | | | 140 | | |
| | 4557448 | | | chromo | ‘chromo’ (CHRromatin Organization | 98.5 | 9.30E−29 | 375 | 433 |
| | | | | | MOd | | | | |
| | 4557448 | | | helicase C | Helicase conserved C-terminal domain | 103 | 3.00E−28 | 821 | 905 |
| | 4557448 | | | myb DNA- | Myb-like DNA-binding domain | 14.9 | 0.00078 | 1258 | 1284 |
| | | | | binding | | | | | |
| | 4557448 | | | AT hook | AT hook motif | 9.3 | 0.22 | 1114 | 3126 |
| | 4557448 | | | TP2 | Nuclear trasnition protein 2 | −58.5 | 0.35 | 2 | 113 |
| | 4557448 | | | Ribosomal L36 | Ribosomal protein L36 | 2.4 | 0.96 | 752 | 769 |
| PCP0485 | 9963969 | NM_006167 | Nuclear | 9963969\|gb\|AF247704.1\|AF247704 Homo sapiens homeobox protein NKX3.1 mRNA, | | | | | |
| | | | | complete cds | | | | | |
| 62, 63 | 9963969 | | | homeobox | Homeobox domain | 101 | 1.20E−27 | 125 | 181 |
| PCP0618 | 13623684 | BC006470 | Nuclear | 13623684\|gb\|BC006470.1\|BC006470 Homo sapiens, Similar to macrophase erythroblast, | | | | | |
| | | | | attacher, clone MGC:3775 IMAGE:2823478, mRNA, complete cds | | | | | |
| 64, 65 | 13623684 | | | Ribosomal L22 | Ribosomal protein L22p/L17e | 7.5 | 0.04 | 29 | 4 |
| | 13623684 | | | Luteo ORF3 | Luteovirus (ORF3) RNA-directed RNA-p | 1.4 | 0.38 | 34 | 60 |
| PCP0419 | 13655140 | NM_001675 | Nuclear | 1365514\|ref\|XM_010004.2\| Homo sapiens activating factor 4 (tax-responsive ehance element | | | | | |
| | | | | B67) (ATF4), mRNA | | | | | |
| 66, 67 | 13655140 | | | bZIP | bZIP transcription factor | 73.3 | 1.50E−20 | 276 | 340 |
| | 13655140 | | | K-box | K-box region | −45.6 | 0.83 | 253 | 333 |
| PCP0673 | 14721378 | NM_014367 | Membrane | 14721378\|ref\|XM_002805.4 Homo sapiens hypothetical protein, estradiol-induced | | | | | |
| 68, 69 | 14721378 | | | (E21KG5), mRNA | | | | | |
| PCP0827 | 190663 | NM_004476 | Membrane | 190663 M99487.1\|HUMPSM Human prostate-specific membrane antigen (PSM) mRNA, | | | | | |
| | | | | complete cds | | | | | |
| 70, 71 | 190663 | | | PA | PA domain | 99.2 | 4.20E−27 | 165 | 265 |
| | 190663 | | | MutS C | DNA mismatch repair proteins mutS fa | 2.2 | 0.77 | 110 | 118 |
| PCP0504 | 182904 | M93036 | Membrane | 182904\|Gb\|M93036.1\|HUMGA7A08 Human (clone 21726) carcinoma-associatod antigen | | | | | |
| 72, 73 | 182904 | | | GA733-2 (GA733-2) mRNA, exon 9 and complete cds, 10439469\|dbj\|AK026585.1\| | | | | | |
| | | | | AK026585 Homo sapiens cDNA: FLJ22932 fis, cone KAT07515, highly similiar to HUMGA7A | | | | | |
| | | | | Human (clone GA733-2-2) | | | | | |
| | 182904 | | | thryoglobulin 1 | Thyroglobulin type-1 repeat | 104.5 | 1.10E−28 | 66 | 135 |
| PCP0508 | 2352837 | AF009255 | Membrane | 2352837\|gb\|AF009255.1\|CLCN6HUM09 Homo sapiens putative chloride channel CLCN6, | | | | | |
| | | | | exons 14, 15, 16, and 17 | | | | | |
| 74, 75 | 2352837 | | | voltage CLC | Voltage gated chloride channel | 649.1 | 1.30E− | 136 | 572 |
| | | | | | | | 192 | | |
| | 2352837 | | | CBS | CBS domain | 95.4 | 5.80E−26 | 805 | 858 |
| | 2352837 | | | K trans | K+ potassium transporter | −566.6 | 0.3 | 313 | 803 |
| PCP0605 | 12654454 | NM_001307 | Membrane | 12654454\|gb\|BC00105.1\|BC001055 Homo sapiens, claudin 7, clone MGC:1858, mRNA, | | | | | |
| 76, 77 | 12654454 | | | complete cdsEST: 14058040\|gb\|BG747387.1\|BG747387 602704864F1 NIH_MGC_15 | | | | | |
| | | | | Homo sapiens cDNA clone IMAGE:4858239 5′ (plus/plus) | | | | | |
| | 12654454 | | | PMP22 Claudin | PMP-22/EMP/MP20/Claudin family | 338.4 | 4.20E−99 | 4 | 182 |
| PCP0713 | 183990 | NM_001982 | Membrane | 183990\|gb\|M34309.1\|HUMHER3A Human epidermal growth factor receptor (HER3) mRNA, | | | | | |
| 78, 79 | | | | complete cds. Also: avian erythroblastic leukemia viral oncogene homolog 3 (ERBB3). | | | | | |
| | 183990 | | | Recep L domain | Receptor L domain | 413.6 | 9.40E− | 364 | 486 |
| | | | | | | | 122 | | |
| | 183990 | | | Furin-like | Furin-like cysteine rich region | 337.3 | 8.70E−99 | 180 | 332 |
| | 183990 | | | pkinase | Protein kinase domain | 216.8 | 1.70E−62 | 709 | 961 |
| | 183990 | | | Keratin B2 | Keratin, high sulfur B2 protein | −79.1 | 0.26 | 180 | 323 |
| | 183990 | | | fer4 | 4Fe-4S binding domain | −3.1 | 0.41 | 278 | 296 |
| | 183990 | | | TNFR c6 | TNFR/NGFR cysteine-rich region | −3.2 | 0.92 | 539 | 576 |
| PCP0852 | 4557340 | NM_001183 | Intracellular | 4557340 NM_001183.1\| Homo sapiens ATPase H+ transporting, lysosomal (vacular | | | | | |
| | | | N) | | | | | | |
| 80, 81 | | | | proton pump) | | | | | |
| PCP0792 | 7862074 | AF245699 | Membrane | 7862074\|gb\|AF45699.1\|AF245699 Homo sapiens type 1 angiotensin II receptor (AGTR1) gene, | | | | | |
| | | | | complete cds | | | | | |
| 82, 83 | 7862074 | | | 7tm 1 | 7 transmembrane receptor (rhodopsin f | 328.5 | 5.20E− | 45 | 302 |
| | | | | | | | 104 | | |
| PCP0627 | 13365514 | NM_130386 | Membrane | 13365514\|dbj\|AB038518.1\|AB038518 Homo sapiens SRCL mRNA for scavenger receptor | | | | | |
| | | | | with C-type lectin type | | | | | |
| 84, 85 | 13365514 | | | lectin c | Lectin C-type domain | 126.5 | 2.60E−35 | 624 | 732 |
| | 13365514 | | | Collagen | Collagen triple helix repeat (20 copi | 100.3 | 2.00E−27 | 527 | 586 |
| | 13365514 | | | Syntaxin | Syntaxin | −102.3 | 0.25 | 65 | 353 |
| | 13365514 | | | RNA pol | DNA-dependent RNA polymerase | −245.3 | 0.28 | 128 | 646 |
| | 13365514 | | | Arginosuc synth | Arginosuccinate synthase | 1.3 | 0.42 | 711 | 729 |
| | 13365514 | | | beta-lactamase | Beta-lactamase | 3 | 0.42 | 668 | 698 |
| | 13365514 | | | DUF164 | Uncharacterized ACR, COG1579 | −99.5 | 0.54 | 244 | 444 |
| | 13365514 | | | ERM | Ezrin/radixin/moesin family | −226.8 | 0.61 | 80 | 405 |
| | 13365514 | | | FAT | FAT domain | −189.1 | 0.9 | 8 | 673 |
| | 13365514 | | | HrcA | HrcA protein C terminal domain | −107.8 | 0.92 | 167 | 360 |
| PCP0735 | 13543530 | NM_020300 | Membrane | 13543530\|gb\|BC005923.1\|BC005923 Homo sapiens, microsomal glutathione S-transferase 1, | | | | | |
| | | | | clone MGC:14525, mRNA, complete cds | | | | | |
| 86, 87 | 13543530 | | | MAPEG | MAPEG family | 163.9 | 1.40E−46 | 67 | 155 |
| | 13543530 | | | SSB | Single-strand binding protein family | 3.3 | 0.66 | 49 | 64 |
| PCP0680 | 183684 | NM_006931 | Membrane | 183684\|gb\|M20681.1\|HUMGTLPA Human glucose transporter-like protein-III (GLUT3), | | | | | |
| | | | | complete cds | | | | | |
| 88, 89 | 183684 | | | sugar tr | Sugar (and other) transporter | 663.9 | 4.30E− | 12 | 465 |
| | | | | | | | 197 | | |
| | 183684 | | | casein kappa | Kappa casein | 39 | 0.26 | 91 | 103 |
| | 183684 | | | ion trans | Ion transport protein | −14.9 | 0.69 | 12 | 145 |
| | 183684 | | | GntP permease | GntP family permease | −385.8 | 0.72 | 108 | 448 |
| | 183684 | | | 7tm 3 | 7 transmembrane receptor (metabotropi | −165.2 | 0.93 | 299 | 491 |
| | 183684 | | | Na H Exchanger | Sodium/hydrogen exchanger family | −191.6 | 0.95 | 69 | 395 |
| PCP0479 | 14781632 | NM_003144 | Membrane | 14781632\|ref\|XM_004462.4 Homo sapiens signal sequence receptor, alpha (translocon- | | | | | |
| | | | | associated protein alpha) (SSR1), mRNA | | | | | |
| 90, 91 | 14781632 | | | PAC | PAC motif | 7 | 0.14 | 17 | 38 |
| PCP0854 | 7108342 | NM_004417 | Intracellular | 7108342 NM_004417.2\| Homo sapiens dual specificity phosphatase 1 (DUSP1), mRNA | | | | | |
| 92, 93 | 7108342 | | | DSPc | Dual specificity phosphatase, catalytic | 263.4 | 1.60E−76 | 173 | 311 |
| | 7108342 | | | Rhodanese | Rhodanese-like domain | 94 | 1.50E−25 | 9 | 131 |
| | 7108342 | | | Y phosphatase | Protein-tyrosine phosphatase | −9.5 | 0.09 | 146 | 308 |
| PCP0749 | 14149664 | NM_015070 | Intracellular | 14149664\|ref\|NM_015070.1 Homo sapiens KIAA0853 protein (KIAA0853), mRNA | | | | | |
| 94, 95 | 14149664 | | | fer4 NifH | 4fe-4s iron sulfur cluster binding pr | 6.1 | 0.047 | 1069 | 1087 |
| PCP0705 | 854166 | NM_003768 | Intracellular | 854166\|emb\|X86809.1\|HPEA15 Homo sapiens mRNA for major astrocytic phosphoprotein | | | | | |
| | | | | PEA-15 | | | | | |
| 96, 97 | 854166 | | | DED | Death effector domain | 122.5 | 4.10E−34 | 3 | 87 |
| PCP0748 | 7669552 | NM_007126 | Intracellular | 7669552\|ref\|NM_007176.2 Homo sapiens valosin-containing protein (VCP), mRNA. | | | | | |
| | | | | Also: transitional endoplasmic reticulum ATPase mRNA | | | | | |
| 98, 99 | 7669552 | | | AAA | ATPase family associated with various | 653.2 | 6.90E− | 513 | 700 |
| | | | | | | | 194 | | |
| | 7669552 | | | cdc48 N | Cell division protein 48 (CDC48), N-t | 142.2 | 4.80E−40 | 22 | 108 |
| | 7669552 | | | Sigma54 actival | Sigma-54 interaction domain | 11.5 | 0.0012 | 514 | 531 |
| | 7669552 | | | NB-ARC | NB-ARC domain | 9.5 | 0.0036 | 516 | 534 |
| | 7669352 | | | Viral helicase1 | Viral (Superfamily 1) RNA helicase | 7.1 | 0.017 | 514 | 578 |
| | 7669552 | | | Exonuc VII S | Exonuclease VII small subunit | 5.6 | 0.087 | 394 | 442 |
| | 7669552 | | | bac dnaA | Bacterial dnaA protein | 2.3 | 0.22 | 514 | 539 |
| | 7669552 | | | ABC tran | ABC transporter | −67.7 | 0.25 | 511 | 700 |
| | 7669552 | | | SRP54 | SRP54-type protein, GTPase domain | 3.7 | 0.3 | 236 | 252 |
| | 7669552 | | | SKI | Skikimate kinase | −78 | 0.32 | 239 | 389 |
| | 7669552 | | | Adeno IVa2 | Adenovirus IVa2 protein | −251.1 | 0.36 | 437 | 712 |
| | 7669552 | | | adenylatekinase | Andenylate kinase | 3.6 | 0.38 | 516 | 524 |
| | 7669552 | | | 2-oxoacid dh | 2-oxo acid dehydrogenases acyltransfe | −158.8 | 0.47 | 279 | 464 |
| | 7669552 | | | RNA helicase | RNA helicase | −138.7 | 0.55 | 409 | 727 |
| | 7669352 | | | UPF0079 | Uncharacterised P-Loop hydrolase UPF0 | −63.7 | 0.6 | 219 | 336 |
| | 7669552 | | | Transposase 9 | Transposase | −20.4 | 0.82 | 411 | 502 |
| PCP0420 | 13636423 | NM_001615 | Intracellular | 13636423\|ref\|XM_010801.2\|Homo sapiens actin, gamma 2, smooth muscle, enteric (ACTG2), | | | | | |
| | | | | mRNA | | | | | |
| 100, 101 | 13636423 | | | actin | Actin | 929.1 | 5.00E− | 1 | 376 |
| | | | | | | | 284 | | |
| PCP0482 | 13124878 | NM_002474 | Intracellular | 13124878\|ref\|NM_002474.1\| Homo sapiens myosin, heavy polypeptide 11, smooth muscle | | | | | |
| 102, 103 | 13124878 | | | (MYH11), transcript variant SM1, mRNA. EST: 1437234\|gb\|BG954178.1\| | | | | | |
| | | | | BG954178 RC4-CT0628-060201-032-h09 CT0628 Homo sapiens cDNA (plus/plus) | | | | | |
| | 13124878 | | | myosin head | Myosin head (motor domain) | 1528.4 | 0 | 87 | 771 |
| | 13124878 | | | Myosin tail | Myosin tail | 778.1 | 1.80E− | 1073 | 1931 |
| | | | | | | | 231 | | |
| | 13124878 | | | M | M protein repeat | 89.9 | 2.60E−24 | 1877 | 1897 |
| | 13124878 | | | Myosin N | Myosin N-terminal SH3-like domain | 75.8 | 4.70E−20 | 33 | 77 |
| | 13124878 | | | IQ | IQ calmodulin-biding motif | 22 | 0.00076 | 787 | 807 |
| | 13124878 | | | bZIP | bZIP transcription factor | 13.4 | 0.0015 | 1788 | 1817 |
| | 13124878 | | | DUF164 | Uncharacterized ACR, COG1579 | −84.3 | 0.063 | 1018 | 1240 |
| | 13124878 | | | Lipoprotein 1 | Borrelia lipoprotein | 4 | 0.075 | 1779 | 1809 |
| | 13124878 | | | Troponin | Troponin | −23.5 | 0.12 | 1199 | 1346 |
| | 13124878 | | | Syntaxin | Syntaxin | −97.5 | 0.12 | 1609 | 1866 |
| | 13124878 | | | filament | Intermediate filament protein | 4.7 | 0.16 | 1072 | 1105 |
| | 13124878 | | | K-box | K-box region | −37.9 | 0.19 | 964 | 1062 |
| | 13124878 | | | HR1 | Hr1 repeat motif | −0.9 | 0.23 | 1034 | 1115 |
| | 13124878 | | | SMC C | SMC family C-terminal domain | −130.2 | 0.28 | 1190 | 1323 |
| | 13124878 | | | spectrin | Spectrin repeat | 5.2 | 0.29 | 1647 | 1677 |
| | 13124878 | | | DUF232 | Putative transcriptional regulator | −32.9 | 0.29 | 1303 | 1436 |
| | 13124878 | | | UBX | UBX domain | −12.9 | 0.33 | 1256 | 1327 |
| | 13124878 | | | PstS | Phosphate-binding protein | 2.5 | 0.45 | 311 | 325 |
| | 13124878 | | | Tropomyosin | Tropomyosin | 1.6 | 0.57 | 1680 | 1701 |
| | 13124878 | | | VanY | D-alanyl-D-alanine carboxypeptidase | −76.5 | 0.61 | 152 | 275 |
| | 13124878 | | | Apolipoprotein | Apolipoprotein A1/A4/E family | −121.2 | 0.67 | 1484 | 1722 |
| | 13124878 | | | Phosphoprotein | Vesiculovirus phosphoprotein | 0.2 | 0.67 | 1087 | 1101 |
| | 13124878 | | | BAR | BAR domain | −100 | 0.72 | 1325 | 1534 |
| | 13124878 | | | Borrelia orfA | Borrelia ORF-A | −107.1 | 0.72 | 1194 | 1512 |
| | 13124878 | | | SOR SNZ | SOR/SNZ family | −42.3 | 0.76 | 1148 | 1351 |
| | 13124878 | | | OEP | Outer membrane efflux protein | −45.8 | 0.79 | 1548 | 1733 |
| | 13124878 | | | Involucrin | Involucrin repeat | 8.8 | 0.88 | 1844 | 1853 |
| | 13124878 | | | hexokinase | Hexokinase | 1.1 | 0.91 | 1370 | 1403 |
| | 13124878 | | | Exo70 | Exo70 exocyst complex subunit | −284 | 0.93 | 1010 | 1546 |
| | 13124878 | | | Transposase 12 | Transposase | −163.8 | 0.95 | 1257 | 1558 |
| | 13124878 | | | B56 | Protein phosphatase 2A regulatory B₈ | 0.6 | 0.96 | 1402 | 1434 |
| PCP0780 | 14250064 | NM_001743 | Intracellular | 14250064\|gb\|BC008437.1\|BC008437 Homo sapiens, calmodulin 2 (phosphorylase kinase, | | | | | |
| | | | | delta), clone MGC:14639, mRNA, complete cds | | | | | |
| 104, 105 | 14250064 | | | efhand | EF hand | 168.8 | 4.80E−48 | 121 | 149 |
| | 14250064 | | | RmaAD | Ribosomal RNA adenine dimethylase | 6.5 | 0.016 | 111 | 147 |

| | | | | |
|---|---|---|---|---|
| PCP0807 | 13111800 | XM_167414 | Intracellular | 13111800\|gb\|BC000163.2\|BC000163 Homo sapiens, vimentin, clone MGC:5062, mRNA, |
| | | | | complete cds |

| | | | | | | | |
|---|---|---|---|---|---|---|---|
| 106, 107 | 13111800 | filament | Intermediate filament protein | 593.6 | 6.30E− | 102 | 410 |
| | | | | | 176 | | |
| | 13111800 | bZIP | bZIP transcription factor | 7.8 | 0.057 | 354 | 378 |
| | 13111800 | Apolipoprotein | Apolipoprotein A1/A4/E family | −101.5 | 0.089 | 85 | 366 |
| | 13111800 | Rota NS26 | Rotavirus NS26 | −106.1 | 0.18 | 1 | 168 |
| | 13111800 | DUF232 | Putative transcriptional regulator | −29.9 | 0.19 | 192 | 330 |
| | 13111800 | DUF164 | Uncharacterized ACR, COG1579 | −94.7 | 0.27 | 178 | 408 |

| PCP0392 | 13655369 | NM_004010 | Intercellular | 13655369\|ref\|XM_017106.1\| Homo sapiens dystrophin (muscular dystrophy, Duchenne | | | | | |
|---|---|---|---|---|---|---|---|---|---|
| | | | | and Becker | | | | | |
| 108, 109 | 13655369 | | | spectrin | Spectrin repeat | 501.6 | 3.00E− | 1556 | 1657 |
| | | | | | | | 148 | | |
| | 13655369 | | | CH | Calponin homology (CH) domain | 134 | 1.40B.37 | 11 | 117 |
| | 13655369 | | | Apolipoprotein | Aplipoprotein A1/A4/E family | −103.8 | 0.11 | 785 | 1051 |
| | 13655369 | | | KE2 | KE2 family protein | −41.9 | 0.15 | 1360 | 1467 |
| | 13655369 | | | DUF164 | Uncharacterized ACR, COG1579 | −98.5 | 0.47 | 907 | 1111 |
| | 13655369 | | | SPX | SPX domain | −76.1 | 0.53 | 865 | 981 |
| | 13655369 | | | pou | Pou domain-N-terminal to homeobox d | 4 | 0.54 | 1156 | 1163 |
| | 13655369 | | | MuDR | MuDR family transposase | −60.7 | 0.66 | 462 | 618 |
| | 13655369 | | | OspEF | Borrelia outer surface protein E and | −84.5 | 0.73 | 1131 | 1309 |
| | 13655369 | | | FliD | Flagellar hook-associated protein 2 | −251.9 | 0.89 | 466 | 943 |
| | 13655369 | | | DUF118 | Helix-turn-helix family DUF118 | −83.5 | 0.92 | 1147 | 1361 |
| PCP0808 | 14734368 | NM_000944 | Cytoplasm | 14734368\|ref\|XM_003316.3 Homo sapiens protein phosphatase 3 (formerly 2B), catalytic | | | | | |
| 110, 111 | 14734368 | | | subunit, alpha isoform (calcineurin A alpha) (PPP3CA), mRNA. 3 end of the DD sequence | | | | | |
| | | | | matches genomic DNA in the intron region | | | | | |
| | 14734368 | | | Stphosphatase | Ser/Thr protein phosphatase | 479.3 | 1.10E− | 43 | 339 |
| | | | | | | | 141 | | |
| PCP0511 | 11427423 | NM_004152 | Cytoplasm | 11427423\|ref\|XM_009414.1\| Homo sapiens ornithine decarboxylase antizyme 1 (OAZ1), | | | | | |
| 112, 113 | | | | mRNA. EST:11642610\|gb\|BF569319.1\|BF569319 602184675T1 NIH_MGC_42 | | | | | |
| | | | | Homo sapiens cNDA clone IMAGE:4300434 3′(plus/minus) | | | | | |
| | 11427423 | | | ODC AZ | Ornithine decarboxylase antizyme | 129.1 | 3.50E−38 | 2 | 68 |
| PCP0647 | 13647403 | NM_001182 | Cytoplasm | 13647403\|ref\|XM_017407.1\| Homo sapiens similar to aldehyde dehydrogenase 7 family, | | | | | |
| | | | | member A1 | | | | | |
| 114, 115 | 13647403 | | | aldedh | Aldehyde dehydrogenase family | 122.0 | 3.00E−34 | 1 | 318 |
| PCP0502 | 14149943 | NM_032236 | Cytoplasm | 14149943\|ref\|NM_032236.1 Homo sapiens hypothetical protein FLJ23277 (FLJ23277), mRNA | | | | | |
| 116, 117 | 14149943 | | | UCH-1 | Ubiquitin carboxyl-terminal hydrolase | 31.6 | 4.50E−07 | 89 | 120 |
| | 14149943 | | | UCH-2 | Ubiquitin carboxyl-terminal hydrolase | 14.6 | 3.10E−05 | 332 | 377 |
| PCP0823 | 1373418 | NM_001000 | Cytoplasm | 1373418\|gb\|U57846.1\|HSU57846 Human ribosomal protein L39 mRNA, complete cds | | | | | |
| 118, 119 | 1373418 | | | Ribosomal L39 | Ribosomal L39 protein | 100.6 | 1.60E−27 | 9 | 51 |
| PCP0598 | 12804630 | NM_016548 | Cytoplasm | 12804630\|gb\|BC001740.1\|BC001740 Homo sapiens, golgi membrane protein GP73, clone | | | | | |
| 120, 121 | | | | MGC:850, mRNAEST: 10939527\|gb\|BF109837.1\|BF109837 7169h08.x1 Saores NSF F8 9W OT | | | | | |
| | | | | PA P S1 Homo sapiens cDNA clone (plus/minus) | | | | | |
| | 12804630 | | | Phosphoprotein | Vesiculovirus phosphoprotein | −0.2 | 0.91 | 121 | 158 |
| PCP9657 | 13529097 | NM_000990 | Cytoplasm | 13529097\|gb\|BC005326.1\|BC005326 Homo sapiens, ribosomal protein L27a, clone | | | | | |
| | | | | MGC:12412, mRNA, complete cds | | | | | |
| 122, 123 | 13529097 | | | L15 | Ribosomal protein L15 | 61.9 | 1.80E−22 | 110 | 142 |
| | 13529097 | | | Arena glycoprol | Arenavirus glycoprotein | −1.1 | 0.91 | 107 | 114 |
| PCP0559 | 13637676 | NM_002539 | Cytoplasm | 13637676\|ref\|XM_002679.2\| Homo sapiens ornithine decarboxylase 1 (ODC1), mRNAEST: | | | | | |
| 124, 125 | 13637676 | | | 12936623\|emb\|AL575449.1\|AL575449 AL575449 LTI NFL006 PL2 Homo sapiens cDNA clone | | | | | |
| | | | | CS0DI060YF19 3 (plus/minus) | | | | | |
| | 13637676 | | | Orn Arg deC N | Pyridoxal-dependent decarboxylase, py | 326 | 7.40E−97 | 44 | 222 |
| PCP0650 | 13642887 | NM_001634 | Cytoplasm | 13642887\|ref\|XM_011385.2\| Homo sapiens S-adenosylmethionine decarboxylase 1 (AMD1), | | | | | |
| | | | | mRNA | | | | | |
| 126, 127 | 13642887 | | | SAM decarbox | Adenosylmethionine decarboxylase | 661.3 | 2.70E− | 1 | 329 |
| | | | | | | | 196 | | |
| PCP0830 | 14044036 | NM_001015 | Cytoplasm | 14044036\|bg\|BC007945.1\|BC007945 Homo sapiens, ribosomal protein S11, clone | | | | | |
| | | | | MGC:143222 IMAGE:4297932, mRNA, complete cds. | | | | | |
| 128, 129 | 14044036 | | | Ribosomal S17 | Ribosomal protein S17 | 149.1 | 2.00E−44 | 75 | 145 |
| PCP0760 | 14195600 | NM_032105 | Cytoplasm | 14195600\|ref\|NM_032105.1 Homo sapiens myosin phosphatase, taget subunit 2 (MYPT2), | | | | | |
| | | | | transcript variant 2, mRNA | | | | | |
| 130, 131 | 14195600 | | | ank | Ank repeat | 177.4 | 1.20E−50 | 249 | 281 |
| | 14195600 | | | G-gamma | GGL domain | 4.1 | 0.34 | 962 | 975 |
| | 14195600 | | | bZIP | bZIP transcription factor | 4.3 | 0.58 | 942 | 978 |
| | 14195600 | | | RNA pol | DNA dependent RNA polymerase | −250.8 | 0.6 | 74 | 552 |
| | 14195600 | | | Adaptin N | Adaptin N terminal region | 1.2 | 0.71 | 600 | 627 |
| PCP0555 | 14198285 | NM_014320 | Cytoplasm | 14198285\|gb\|BC008205.1\|BC008205 Homo sapiens, putative heme-binding protein, clone | | | | | |
| 132, 133 | 14198285 | | | MGC:17713, mRNA, complete cdsEST: 13793234\|gb\|BG65582.1\|BG655825 ib40e02.x1 | | | | | |
| | | | | HR85 islet Homo sapiens cDNA 3′ similar to TR:Q9Y5Z4 (plus/minus) | | | | | |
| | 14198285 | | | | | | | | |
| PCP0799 | 14603308 | BC010112 | Cytoplasm | 14603308\|gb\|BC010112.1\|BC010112 Homo sapiens, heat shock 60kD protein 1 (chaperonin), | | | | | |
| | | | | clone MGC:19755, mRNA, complete cds | | | | | |
| 134, 135 | 14603308 | | | cpn60 TCP1 | TcP-1/cpn60 chaperonin family | 723.2 | 6.20E− | 37 | 540 |
| | | | | | | | 215 | | |
| | 14603308 | | | Asparaginase | Asparaginase | −166.5 | 0.79 | 69 | 359 |
| | 14603308 | | | NB-ARC | NB-ARC domain | 1.3 | 0.88 | 353 | 394 |
| PCP0468 | 179829 | NM_004342 | Cytoplasm | 179829\|gb\|M64110.1\|HUMCALD Human caldesmon mRNA, complete cds | | | | | |
| 136,137 | 179829 | | | Caldesmon | Caldesmon | 1057.2 | 0 | 1 | 538 |
| | 179829 | | | G-gamma | GGL domain | 4.5 | 0.24 | 346 | 367 |
| PCP0546 | 338234 | M33216 | Cytoplasm | 338234\|gb\|M33216.1\|HUMSMAAA Human aortic-type smooth muscle alpha-actin | | | | | |
| 138, 139 | 338235 | | | (SM-alpha-A) gene, exon 9. EST: 13581056\|gb\|BG573403.1\|BG573403 602595180F | | | | | |
| | | | | NIH_MGC_79 Homo sapiens cDNA clone IMAGE:4724587 ′ (plus/minus) | | | | | |
| | 338234 | | | actin | Actin | 112.5 | 3.50E−35 | 1 | 47 |
| PCP0667 | 809558 | NM_000256 | Cytoplam | 809558\|emb\|X84075.1\|HSMYBPC H.sapiens mRNA for cardiac myosin binding protein-C | | | | | |
| 140, 141 | 809558 | | | fn3 | Fibronectin type III domain | 170.5 | 1.40E−48 | 1066 | 1151 |
| | 809558 | | | ig | Immunoglobulin domain | 127.5 | 2.80E−39 | 1195 | 1255 |
| | 809558 | | | ATP-gus Ptrans | ATP:guanldo phosphotransferase, C-ter | 4.7 | 0.095 | 536 | 559 |
| | 809558 | | | Bima VP3 | Bimavirus VP3 protein | 2 | 0.62 | 827 | 839 |
| PCP0488 | 1143491 | NM_005347 | Cytoplasm | 1143491\|emb\|X87949.1\|HSRNABIP H.sapiens mRNA for BiP protein | | | | | |
| 142, 143 | 1143491 | | | HSP70 | Hsp70 protein | 1415.1 | 0 | 130 | 635 |
| | 1143491 | | | Hydantoinase A | Hydantoinase/oxoprolinase | −330.3 | 0.086 | 30 | 371 |
| | 1143491 | | | Ppx-GppA | Ppx/GppA phosphatase family | −136.9 | 0.8 | 115 | 362 |
| | 1143491 | | | Fibrillarin | Fibrillarin | −128.7 | 0.85 | 150 | 366 |
| PCP0656 | 2370089 | NM_000366 | Cytoplasm | 2370089\|emb\|AJ000147.1\|HSAJ147 Homo sapiens mRNA for alpha-tropmyosin (3′ end) | | | | | |
| 144, 145 | 2370089 | | | Tropomyosin | Tropomyosin | 97.1 | 1.30E−31 | 2 | 48 |
| PCP0707 | 3327967 | NM_002606 | Cytoplasm | 3327967\|gb\|AF067223.1\|AF067223 Homo sapiens cGMP phosphodiestarase A1 (PDE9A) | | | | | |
| | | | | mRNA, complete cds | | | | | |
| 146, 147 | 3327967 | | | PDEase | 3′5′-cyclic nucleotide phosphodiester | 225.9 | 1.30E−79 | 311 | 533 |
| | 3327967 | | | HD | HD domain | −10.5 | 0.52 | 313 | 426 |
| | 3327967 | | | gntR | Bacterial regulator proteins, gntR f | 3.4 | 0.92 | 136 | 150 |
| PCP0775 | 4507648 | NM_003289 | Cytoplasm | 4507648\|ref\|NM_003289.1 Homo sapiens tropomyosin 2 (beta) (TM2), mRNA | | | | | |
| 148, 149 | 4507648 | | | Tropomysin | Tropomosin | 521.5 | 6.10E− | 48 | 284 |
| | | | | | | | 168 | | |
| | 4507648 | | | bZIP | bZIP transcription factor | 10.3 | 0.011 | 33 | 66 |
| | 4507648 | | | OEP | Outer membrane efflux protein | −36.6 | 0.21 | 50 | 220 |
| | 4507648 | | | STAT prot | STAT protein, protein interaction dom | −49 | 0.49 | 102 | 206 |
| | 4507648 | | | Troponin | Troponin | −33 | 0.57 | 145 | 282 |
| | 4507648 | | | Hanta nucleocap | Hantavirus nucleocapsid protein | 0.1 | 0.77 | 90 | 119 |
| | 4507648 | | | M | M protein repeat | 11.9 | 0.79 | 223 | 243 |
| | 4507648 | | | Semialdhyde dh | Semialdehyde dehydrogenase, NAD bindi | 2 | 0.87 | 132 | 155 |
| PCP0791 | 7959918 | AF116710 | Cytoplasm | 7959918\|gb\|AF116710.1\|AF116710 Homo sapiens PRO2640 mRNA, complete cds. Also: | | | | | |
| | | | | ribosomal protein S14 (RPS14), mRNA | | | | | |
| 150 | 7959918 | | | Ribosomal S11 | Ribosomal protein S11 | 234.9 | 1.70E−73 | 29 | 147 |
| PCP0390 | 13529151 | NM_020169 | Cytoplasm | 13529151\|gb\|BC005346.1\|BC005346 Homo sapiens, latexin protein, clone MGC:12439, | | | | | |
| 151, 152 | 13529151 | | | mRNA, complete cds | | | | | |
| PCP0771 | 13938352 | NM_001007 | Cytoplasm | 13938352\|gb\|BC007308.1\|BC007308 Homo sapiens, Similar to RIKEN cDNA 1110033J19 | | | | | |
| 153, 154 | 13938352 | | | gene, clone MGC:15711, mRNA, complete cds. Also: risbosomal protein S4, linked (RPS4X), | | | | | |
| | | | | mRNA | | | | | |
| | 13938352 | | | Ribosomal S4e | Ribsosomal family S4e | 226.1 | 2.70E−65 | 29 | 134 |
| PCP0666 | 14015 | X55654 | Cyto/Nuc | 14015\|em\|X55654.1\|MTHSCOXII H.sapiens mitochondrial coxII mRNA for | | | | | |
| | | | | cytochrome C oxidase II | | | | | |
| 155 | 14015 | | | COX2 | Cytochrome C oxidase subunit II, peripl | 309.3 | 2.40E−90 | 54 | 185 |
| | 14015 | | | COX2 TM | Cytochrome C oxidase subunit II, transm | 63.1 | 1.60E−17 | 1 | 42 |
| PCP0415 | 517176 | NM_006106 | Cyto/Nuc | 517176\|emb\|X80507.1\|HSYAP65 H.sapiens YAP65.EST: 11945539\|gb\|BF671644.1\|BF671644 | | | | | |
| 156, 157 | 517176 | | | 6021152396F1 NIH_MGC_81 Homo sapiens cDNA clone IMAGE:42937 (plus/plus) | | | | | |
| | 517176 | | | WW | WW domain | 53.7 | 2.10E−13 | 173 | 202 |
| PCP0710 | 14042154 | NM_017647 | Nuclear | 14042154\|dbj\|AK027463.1\|AK027463 Homo sapiens cDNA FLJ14557 fis, clone NT2RM2001896, | | | | | |
| 158, 159 | 14042154 | | | weakly similar to CELL DIVISION PROTEIN FTSI. Also: | | | | | |
| | | | | mitochondrial coxII mRNA for cytochrome C oxidase II subunit | | | | | |
| | 14042154 | | | FtsJ | FtsJ-like methyltransfersae | 275.6 | 3.40E.80 | 24 | 202 |
| | 14042154 | | | COX2 TM | Cytochrome C oxidase subunit II, trans | 25.5 | 5.50E−07 | 458 | 493 |
| | 14042154 | | | Nol1 Nop2 Sun | NOL1/NOP2/sun family | 1.6 | 0.68 | 49 | 76 |
| | 14042154 | | | QRPTase | Quinolinate phosphoribosyl transferase | 2.1 | 0.84 | 326 | 335 |

[0167] TABLE 2

| | | | | | | | | |
|---|---|---|---|---|---|---|---|---|
| GI# | NM | classification | domain | description | Score | E | seq-f | seq-t |

| PCP0620 | 4929680 | NM_013237 | Cytoplasm | 492980\|gb\|AF151864.1\|AF151864 Homo sapiens CGI-106 protein mRNA, complete cds and gb\| | | | | | |
|---|---|---|---|---|---|---|---|---|---|
| 160, 161 | 4929680 | | | AF112203.1\|AF112203 Homo sapiens PX19 protein mRNA, complete | | | | | |
| PCP0714 | 11640567 | NM_000969 | Cytoplasm | 11640567\|gb\|AF113210.1\|AF112310 Homo sapiens MSTP030 mRNA, complete cds. Also: | | | | | |
| | | | | ribosomal protein L5 (RPL5), mRNA | | | | | |
| 162, 163 | 11640567 | | | Ribosomal L18p | Ribosomal L18p/L5e family | 261.9 | 4.50E−76 | 26 | 173 |
| PCP05619 | 14249863 | NM_013237 | Cytoplasm | 14249863\|bg\|BC008307.1\|BC008307 Homo sapiens, px19-like protein, clone MGC:15214, | | | | | |
| 164, 165 | 14249863 | | | mRNA, complete cds | | | | | |
| PCP0513 | 14249920 | AY029066 | Unknown | 14249920\|gb\|BC008341.1\|BC008341 Homo sapiens, clone MGC:15852, mRNA, compete cds | | | | | |
| 166, 167 | 14249920 | | | EST: 13285972\|gb\|BG392524.1\|BC392524 6024107729F1 NIH_MGC_92 | | | | | |
| | | | | Homo sapiens cDNA clone IMAGE:4539727 5′ (plus/plus) | | | | | |
| | 14249920 | | | | | | | | |
| PCP0708 | 12053382 | NM_014585 | Membrane | 12053382\|emb\|AL136944.1\|HSM801908 Homo sapiens mRNA; cDNA DKFZp58610624 | | | | | |
| | | | | (from clone DKFZp58610624); complete cds. Also: SLC11A3 iron transporter | | | | | |
| 168, 169 | 12053382 | | | xan ur permease | Permease family | −189.7 | 0.47 | 92 | 426 |
| | 12053382 | | | DUF33 | Domain of unknown function DUF33 | 1.4 | 0.97 | 54 | 77 |
| PCP0551 | 13650139 | NM_007043 | Nuclear | 13650139\|ref\|XM_006702.3\|Homo sapiens HIV-1 rev binding protein 2 (HRB2), | | | | | |
| 170, 171 | 13650139 | | | mRNAEST: 14000799\|gb\|BG721612.1\|BG721612 602695736F1 NIH_MGC_97 | | | | | |
| | | | | Homo sapiens cDNA clone IMAGE:4827704 5′ (plus/plus) | | | | | |
| PCP0803 | 14249297 | M28016 | Extracellular | 1424929\|ref\|NM_032702.1 Homo sapiens hypothetical protein MGC2724 (MGC2724), mRNA. | | | | | |
| 172 | 14249297 | | | A2M | Alpha 2-macroglobulin family | 59.4 | 7.10E−19 | 1 | 86 |
| PCP0774 | 182734 | K00650 | Nuclear | 182734 K00650.1\|HUMFOS Human fos proto-oncogene (c-fos), complete cds | | | | | |
| 173, 174 | 182734 | | | bZIP | bZIP transcription factor | 35.3 | 9.40E−10 | 135 | 199 |
| | 182734 | | | bZIP Maf | bZIP Maf transcription factor | −69.5 | 0.083 | 180 | 215 |
| | 182734 | | | DegT DnrJ EryC1 | DegT/DnrJ/EryC1/StrS family | −244.5 | 0.9 | 20 | 260 |
| PCP0615 | 291872 | NM_005180 | Nuclear | 291872\|gb\|L13689.1\|HUMBMI1X Human prot-oncogene (BMI-1) mRNA, complete cds | | | | | |
| 175, 176 | 291872 | | | zf-C3HC4 | Zinc finger, C3HC4 type (RING finger) | 50.5 | 1.60E−15 | 18 | 56 |
| | 291872 | | | PHD | PHD-finger | −20.5 | 0.73 | 17 | 59 |
| PCP0825 | 414929 | NM_003467 | Membrane | 414929 L06797.1\|HUMGPCR Human clone (L5) orphan G protein-coupled recpeter mRNA, | | | | | |
| 177, 178 | 414929 | | | complete cds | | | | | |
| PCP0585 | 476104 | NM_004882 | Nuclear | 476104\|gb\|U03644.1\|HSU03644 Human recepin mRNA, complete cds and ref\|XM_002455.2\| | | | | | |
| 179, 180 | 476104 | | | Homo sapiens CBF1 interacting corepressor (CIR), mRNA | | | | | |
| PCP0857 | 3860076 | NM_006418 | Extracellular | 3860076 AF097021 Homo sapiens GW112 protein (GW112) mRNA | | | | | |
| 181, 182 | 3860076 | | | | | | | | |
| PCP0711 | 4503492 | NM_001964 | Nuclear | 4503492\|ref\|NM_001964.1 Homo sapiens early growth response 1 (EGR1), mRNA. | | | | | |
| | | | | Also: zinc finger protein and transcription factor ETR103 | | | | | |
| 183, 184 | 4503492 | | | zf-C2H2 | Zinc finger, C2H2 type | 91.3 | 1.00E−24 | 396 | 418 |
| | 4503492 | | | hormone | Somatotropin hormone family | 2 | 0.11 | 150 | 173 |
| | 4503492 | | | zf-BED | BED zinc finger | −4.2 | 0.22 | 357 | 391 |
| | 4503492 | | | thiored | Thioredoxin | 3.1 | 0.7 | 94 | 118 |
| PCP0841 | 4583651 | NM_005977 | Nuclear | 4583651\|emb\|AJ010346.1\|HSA010346 Homo sapiens mRNA for RING-H2 protein FNF6, | | | | | |
| | | | | alternative exon 1a | | | | | |
| 185, 186 | 4583651 | | | zf-C3HC4 | Zinc finger, C3HC4 type (RING finger) | 27.5 | 1.80E−08 | 632 | 672 |
| | 4583651 | | | PA28 beta | Proteasome activator pa28 beta subuni | −84.6 | 0.37 | 368 | 517 |
| | 4583651 | | | PHD | PHD-finger | −19.9 | 0.63 | 631 | 675 |
| | 4583651 | | | RNA pal omega | RNA polymerase omega subunit | −16.9 | 0.93 | 373 | 455 |
| PCP0849 | 11433150 | NM_001870 | Extracellular | 11433150 XM_0030081\|Homo sapiens carboxypeptidase A3 (mast cell) (CPA3), mRNA | | | | | |
| 187, 188 | 11433150 | | | Zn carbOpept | Zinc carboxypeptidase | 568.8 | 1.80E− | 119 | 400 |
| | | | | | | | 168 | | |
| | 11433150 | | | Propep M14 | Carboxypeptidase activation peptide | 161.4 | 7.70E−46 | 25 | 104 |
| PCP0814 | 12053078 | NM_030817 | Membrane | 12053078\|emb\|AL136783.1\|HSM801751 Homo sapiens mRNA; cDNA DKFZp434F0318 | | | | | |
| | | | | (from clone DKFZp434F0318); complete cds | | | | | |
| 189, 190 | 12053078 | | | MotA ExbB | MotA/TolQ/ExbB proton channel family | −52.8 | 0.11 | 3 | 125 |
| | 12053078 | | | CMD | Carboxymuconolactone decarboxylase | −28.6 | 0.7 | 17 | 106 |
| | 12053078 | | | Tropomyosin | Tropomyosin | 1.3 | 0.71 | 198 | 229 |
| PCP0530 | 12654422 | NM_000996 | Cytoplasm | 12654422\|gb\|BC001037.1\|BC001037 Homo sapiens, robosomal protein L35a, clone MGC:1639, | | | | | |
| | | | | mRNA | | | | | |
| 191, 192 | 12654422 | | | Ribosomal L35Ae | Ribosomal protein L35Ae | 269 | 3.10E−78 | 5 | 104 |
| PCP0798 | 12732572 | XM_165833 | Extracellular | 12732572\|ref\|XM_004467.2 Homo sapiens coagulation factor XIII, A1 polypeptide (F13A1), | | | | | |
| | | | | mRNA | | | | | |
| 193, 194 | 12732572 | | | Transglutamin C | Transglutaminase family | 359.3 | 2.10E− | 503 | 728 |
| | | | | | | | 105 | | |
| | 12732572 | | | Tansglutamin N | Transglutaminase family | 225 | 5.50E−65 | 46 | 167 |
| | 12732572 | | | Tansglut core | Transglutaminase-like superfamily | 187.4 | 1.20E−53 | 310 | 399 |
| | 12732572 | | | Terpene synth | Terpene synthase family | 1.6 | 0.4 | 56 | 67 |
| PCP0581 | 13647040 | NM_015865 | membrane | 13647040\|ref\|XM_012742.2\|Homo sapiens solute carrier family 14 (urea transporter), | | | | | |
| 195, 196 | 13647040 | | | member 1 (Kidd blood group) (SLC14A1), mRNAEST: 13040853\|gb\| | | | | | |
| | | | | BG287225.1\|BG287225 602381952F1 NIH_MGC_92 Homo sapiens cDNA clone | | | | | |
| | | | | IMAGE:4499388 5′ (plus/plus) | | | | | |
| | 13647040 | | | DUF6 | Integral membrane protein DUF6 | −28.1 | 0.8 | 160 | 276 |
| PCP0750 | 13647324 | NM_001964 | Nuclear | 13647324\|ref\|XM_0064063.2 Homo sapiens early growth response 1 (EGR1), mRNA | | | | | |
| 197, 198 | 13647324 | | | zf-C2H2 | Zinc finger, C2H2 type | 91.3 | 1.00E−24 | 396 | 418 |
| | 13647324 | | | hormone | Somatotropin hormone family | 2 | 0.11 | 150 | 173 |
| | 13647324 | | | zf-BED | BED zinc finger | −4.2 | 0.22 | 357 | 391 |
| | 13647324 | | | thiored | Thioredoxin | 3.1 | 0.7 | 94 | 118 |
| PCP0810 | 14017398 | AY029066 | Extracellular | 14017398\|gb\|AY029066.1\|Homo sapiens Humanin (HN1) mRNA, complete cds. Also: 7020373\| | | | | | |
| 199, 200 | 14017398 | | | dbj\|AK000348.1\|AK000348 Homo sapiens cDNA FLJ20341 fis, clone HEP13116, | | | | | |
| | | | | highly similar to D43949 Human mRNA for KIAA0082 gene | | | | | |
| | 14017398 | | | | | | | | |
| PCP0864 | 14736688 | NM_002343 | Extracellular | 14736688\|ref\|XM_030418.1\|Homo sapiens lactotransferrin (LTF), mRNA | | | | | |
| 201, 202 | 14736688 | | | transferrin | Transferrin | 1219.8 | 0 | 365 | 696 |
| | 14736688 | | | Mago nashi | Mago Mashi protein | 1.6 | 0.66 | 584 | 603 |
| PCP0792 | 6808606 | NM_013281 | Membrane | 680606\|gb\|AF169677.1\|AF169677 Homo sapiens lecuine-rich repeat transmembrane | | | | | |
| | | | | protein FLRT3 (FLRT3) mRNA, complete cds | | | | | |
| 203, 204 | 6808606 | | | LRR | Leucine Rich Repeat | 134.4 | 1.10E−37 | 272 | 295 |
| | 6808606 | | | LRR | Leucine rich repeat C-terminal domain | 55.8 | 4.90E−14 | 305 | 356 |
| | 6808606 | | | LRRNT | Leucine rich repeat N-terminal domain | 27.4 | 1.80E−05 | 30 | 57 |
| | 6808606 | | | fn3 | Fibronectin type III domain | 11.1 | 0.011 | 405 | 485 |
| PCP0722 | 7019382 | NM_013281 | Membrane | 7019382\|ref\|NM_013281.1\|Homo sapiens fibronectin leucine rich transmembrane protein | | | | | |
| | | | | 3 (FLRT3), mRNA | | | | | |
| 205, 206 | 7019382 | | | LRR | Leucine Rich Repeat | 134.4 | 1.10E−37 | 272 | 295 |
| | 7019382 | | | LRRCT | Leucine rich repeat C-terminal domain | 55.8 | 4.90E−14 | 305 | 356 |
| | 7019382 | | | LRRNT | Leucine rich repeat N-terminal domain | 27.4 | 1.80E−05 | 30 | 57 |
| | 7019382 | | | fn3 | Fibronectin type III domain | 11.1 | 0.011 | 405 | 485 |
| PCP0642 | 10190747 | NM_020974 | Extracellular | 10190747\|ref\|NM_020974.1\|Homo sapiens CEGP1 protein (CEPG1), mRNA | | | | | |
| 207, 208 | 10190747 | | | EGF | EGF-like domain | 228.3 | 5.70E−66 | 407 | 442 |
| | 10190747 | | | CUB | CUB domain | 70.3 | 2.00E−18 | 809 | 918 |
| | 10190747 | | | granulin | Granulin | 7.5 | 0.027 | 303 | 323 |
| | 10190747 | | | TIL | Trypsin Inhibitor like cysteine rich | −2 | 0.038 | 84 | 132 |
| | 10190747 | | | TNFR c6 | TNER/NGFR cysteine-rich region | 9 | 0.046 | 698 | 728 |
| | 10190747 | | | Keratin B2 | Keratin, high sulfur B2 protein | −67.5 | 0.047 | 111 | 242 |
| | 10190747 | | | S mold repeat | Dictyostelium (slime mold) repeat | 8.2 | 0.67 | 125 | 149 |
| PCP0740 | 13097704 | XM_028322 | Extracellular | 13097704\|gb\|BC003559.1\|BC003559 Homo sapiens, serine (or cysteine) proteinase inhibitor, | | | | | |
| 209, 210 | 13097704 | | | clade A (alpha-1 antiproteinase, antitrypsin), member 3, clone MGC:1813, complete cds | | | | | |
| | 13097704 | | | sepin | Serpin (serine protease inhibitor) | 735.2 | 1.50E− | 146 | 420 |
| | | | | | | | 218 | | |
| PCP0819 | 13173403 | AF339085 | Membrane | 13173403 AF339085 Homo sapiens NADH dehydrogenase subunit 5 (MTND5) mRNA, RNA 5 | | | | | |
| 211, 212 | 13173403 | | | oxidored ql | NADH-Ubiquinone/plastoquinone | 381.5 | 4.50E− | 134 | 420 |
| | | | | | (comp1) | | 112 | | |
| | 13173403 | | | oxidored ql N | NADH-Ubiquinone oxidoreductase | 110.2 | 2.10E−30 | 62 | 123 |
| | | | | | (comp | | | | |
| | 13173403 | | | Na Pi cotrans | Na⁺/Pi-cotransporter | −160.7 | 0.41 | 217 | 585 |
| | 13173403 | | | UPF0032 | MttB family UPF0032 | −95.9 | 0.44 | 273 | 483 |
| | 13173403 | | | ERG4 ERG24 | Ergosteral biosynthesis ERG4/ERG24 fa | −316.1 | 0.61 | 249 | 597 |
| | 13173403 | | | xan ur permease | Permease family | −195.1 | 0.72 | 209 | 536 |
| | 13173403 | | | ABC2 membrane | ABC-2 type transporter | −137.3 | 0.72 | 173 | 427 |
| | 13173403 | | | MVIN | Virulence factor MVIN | −260.3 | 0.8 | 63 | 529 |
| | 13173403 | | | sugar tr | Sugas (and other) transporter | −205.6 | 0.89 | 166 | 557 |
| | 13173403 | | | 7tm 3 | 7 transmembrane receptor (metabotropi | −165.1 | 0.93 | 239 | 436 |
| PCP0385 | 13632411 | NM_001099 | Membrane | 13632411\|ref\|XM_002837.3\|Homo sapiens acid phosphatase, prostate (ACPP), mRNA | | | | | |
| 213, 214 | 13632411 | | | acid phosphat | Histidine acid phosphatase | 539.3 | 1.40E− | 33 | 373 |
| | | | | | | | 159 | | |
| PCP0515 | 13642675 | NM_004342 | Cytoplasm | 13642675\|ref\|XM _01557.2\|Homo sapiens region containing NAG22 protein; caldesmon 1 | | | | | |
| 215, 216 | 13642675 | | | (LOC83043), mRNAEST: 10997856\|dbj\|AU137317.1\|AU137317 AU137317 PLACE1 | | | | | |
| | | | | Homo sapiens cDNA clone PLACE1006233 5′ (plus/plus) | | | | | |
| | 13642675 | | | Caldesmon | Caldesmon | 1059.1 | 0 | 1 | 538 |
| | 13642675 | | | G-gamma | GGL domain | 4.5 | 0.24 | 346 | 367 |
| | 13642675 | | | KIX | KIX domain | −19.2 | 0.75 | 255 | 319 |
| PCP0406 | 13643509 | NM_002343 | Extracellular | 13643509\|ref\|XM_010963.2\| Homo sapiens lactotransferrin (LTF), mRNA | | | | | |
| 217, 218 | 13643509 | | | transferrin | Transferrin | 269.2 | 1.00E−78 | 1 | 285 |
| | 13643509 | | | Mago nashi | Mago nashi protein | 1.6 | 0.66 | 173 | 192 |
| PCP0518 | 13644505 | NM_001723 | Nuclear | 13644505\|ref\|XM_004233.3\| Homo sapiens bullous pemphigoid antigen 1 (230/240kd) | | | | | |
| 219, 220 | 13644505 | | | (BPAG1), mRNAEST: 11592016\|gb\|BF508718.1\|BF508718 UI-H-B14-aoq-a-04 0-ULs1 NCI_ | | | | | |
| | | | | CGAP_Sub8 Homo sapiens cNDA clone (plus/minus) | | | | | |
| | 13644505 | | | Plectin repeat | Plectin repeat | 310.7 | 9.30E−91 | 2553 | 2597 |
| | 13644505 | | | spectrin | Spectrin repeat | 42.4 | 1.40E−11 | 935 | 961 |
| | 13644505 | | | bZIP | bZIP transcription factor | 14.9 | 0.00058 | 1608 | 1638 |
| | 13644505 | | | Tropomyosin | Tropomyosin | 7.4 | 0.0081 | 1831 | 1859 |
| | 13644505 | | | M | M protein repeat | 18.5 | 0.0082 | 1826 | 1846 |
| | 13644505 | | | ldh C | lactate/malate dehydrogenase, alpha/b | 8.7 | 0.02 | 1527 | 1552 |
| | 13644505 | | | Myc-LZ | Myc leucine zipper domain | 17.1 | 0.021 | 1595 | 1630 |
| | 13644505 | | | SH3 | SH3 domain | −6.9 | 0.03 | 564 | 616 |
| | 13644505 | | | PCNA | Proliferating cell nuclear antigen, N | −62.2 | 0.16 | 779 | 874 |
| | 13644505 | | | HlyC | RTX toxin acyltransferase family | 3.4 | 0.27 | 414 | 423 |
| | 13644505 | | | B | B domain | −4.8 | 0.37 | 1616 | 1669 |
| | 13644505 | | | RPEL | RPEL repeat | 5.1 | 0.49 | 1502 | 1527 |
| | 13644505 | | | Ribosomal S3 N | Ribosomal protein S3 N-terminal doma | 3 | 0.5 | 2123 | 2149 |
| | 13644505 | | | ERM | Ezrin/radixin/moesin family | −226.2 | 0.58 | 1170 | 1424 |
| | 13644505 | | | Lipoprotein 7 | Adhesin lipoprotein | −131 | 0.59 | 1376 | 1820 |
| | 13644505 | | | FCH | Fes/CIP4 homology domain | −21.2 | 0.73 | 1773 | 1863 |
| | 13644505 | | | Paramyxo P | Paramyxovirus P phosphoprotein | −335 | 0.75 | 407 | 872 |
| | 13644505 | | | SNAP-25 | SNAP-25 family | −57.5 | 0.79 | 246 | 442 |
| | 13644505 | | | enolase | Enol-ase | 0.7 | 0.8 | 1156 | 1176 |
| | 13644505 | | | PGAM | Phosphoglycerate mutase family | −130.9 | 0.86 | 169 | 357 |
| | 13644505 | | | RecX | RecX family | −38.3 | 0.9 | 272 | 393 |
| | 13644505 | | | HDV ag | Hepatitis delta virus delta antigen | −53.7 | 0.96 | 1167 | 1356 |
| PCP0623 | 13644568 | NM_015384 | Nuclear | 13644568\|ref\|XM_003877.3\| Homo sapiens IDN3 protein (IDN3), mRNAEAST: | | | | | |
| 221, 222 | 13644568 | | | 14213250\|gb\|BG862712.1 BM862712 602796442F1 NIH_CGAP_Mam4 | | | | | |
| | | | | Mus musculus cDNA clone IMAGE:4917443 5′ (plus/plus) | | | | | |
| | 13644568 | | | MIF4G | MIF4G domain | −20.5 | 0.12 | 481 | 743 |
| | 13644568 | | | Rep | Replication protein | 4.7 | 0.15 | 977 | 993 |
| | 13644568 | | | thymidylat syn | Thymidylate synthase | 2.8 | 0.53 | 461 | 479 |
| | 13644568 | | | LMWPc | Low molecular weight phosphotyrosine | −53.2 | 0.61 | 450 | 574 |
| | 13644568 | | | FliG-C | FliG C-terminal domain | −50.6 | 0.68 | 223 | 335 |
| | 13644568 | | | ATP-synt DE | ATP synthase, Delta/Epsilon chain, lo | 3.3 | 0.76 | 300 | 347 |
| | 13644568 | | | interferon | Interferon alpha/beta domain | 2 | 1 | 850 | 861 |
| PCP0641 | 14740173 | NM_025226 | Membrane | 14740173\|re\|XM_017806.2\| Homo sapiens MSTP032 protein (MSTP032), mRNA | | | | | |
| 223, 224 | 14740173 | | | | | | | | |
| PCP0577 | 14765929 | NM_015865 | Membrane | 14765929\|ref\|XM_012742.3 Homo sapiens solute carrier family 14 (urea trasnporter), | | | | | |
| | | | | member 1 (Kidd blood group) (SLC14A1), mRNA | | | | | |
| 225, 226 | 14765929 | | | DUF6 | Integral membrane protein DUF6 | −28.1 | 0.8 | 160 | 276 |
| PCP0709 | 179295 | L08441 | Cytoplasm | 179295\|gb\|L08441.1\|HUMAUTONH Human autonomously replicating sequence (ARS) mRNA | | | | | |
| 227, 228 | 179295 | | | COX3 | Cytochrome c oxidase subunit III | 649.5 | 9.00E− | 6 | 261 |
| | | | | | | | 193 | | |
| PCP0474 | 179518 | NM_001723 | Nuclear | 179518\|gb\|M63618.1\|HUMBPA Human bullous pemphigoid antigen mRNA, complete cds | | | | | |
| 229, 230 | 179518 | | | Plectin repeat | Plectin repeat | 310.7 | 9.30E−91 | 1999 | 2043 |
| | 179518 | | | bZIP | bZIP transcription factor | 11.9 | 0.004 | 1054 | 1084 |
| | 179518 | | | Tropomyosin | Tropomyosin | 7.4 | 0.0081 | 1277 | 1305 |
| | 179518 | | | M | M protein repeat | 18.5 | 0.0082 | 1272 | 1292 |
| | 179518 | | | ldh C | lactate/malate dehydrogenase, alpha/b | 8.7 | 0.02 | 973 | 998 |
| | 179518 | | | SH3 | SH3 domain | −6.9 | 0.03 | 10 | 62 |
| | 179518 | | | Myc-LZ | Myc leucine zipper domain | 14.7 | 0.06 | 1041 | 1076 |
| | 179518 | | | PCNA | Proliferating cell nuclear antingen, N | −62.2 | 0.16 | 225 | 320 |
| | 179518 | | | spectrin | Spectrin repeat | 5.5 | 0.24 | 381 | 407 |
| | 179518 | | | B | B domain | −4.8 | 0.37 | 1062 | 1115 |
| | 179518 | | | RPEL | RPEL repeat | 5.1 | 0.49 | 948 | 973 |
| | 179518 | | | Ribosomal S3 N | Ribosomal protein S3, N-terminal doma | 3 | 0.5 | 1569 | 1595 |
| | 179518 | | | ERM | Ezrin/radixin/moesin family | −226.2 | 0.58 | 616 | 870 |
| | 179518 | | | Lipoprotein 7 | Adhesion lipoprotein | −131 | 0.59 | 822 | 1266 |
| | 179518 | | | FCH | Fes/CIP4 homology domain | −21.2 | 0.73 | 1219 | 1309 |
| | 179518 | | | enolase | Enol-ase | 0.7 | 0.8 | 602 | 622 |
| | 179518 | | | HDV ag | Hepatitis delta virus delta antigen | −53.7 | 0.96 | 613 | 802 |
| PCP0427 | 311380 | NM_030752 | Cytoplasm | 311380\|emb\|X52882.1\|HSTCP1 Human t-complex polypetide 1 gene | | | | | |
| 231, 232 | 311380 | | | cpn60 TCP1 | TCP-1/cpn60 chaperonin family | 808 | 1.80E− | 28 | 535 |
| | | | | | | | 240 | | |
| | 311380 | | | ATP-synt B | ATP synthase B/B′ CF(0) | 4 | 0.36 | 302 | 337 |
| PCP0425 | 3170185 | NM_005869 | Nuclear | 3170185\|gb\|AF039693.1\|AF039693 Homo sapiens unknown protein mRNA, complete cdsEST: | | | | | |
| 233, 234 | 3170185 | | | 5234657\|bg\|AI768148.1\|AI768148 wg81f10.x1 Soares NSF F8 9W OT PA P S1 Homo sapiens | | | | | |
| | | | | cDNA cloneIMAGE:2371531 3′ similar to TR:O60530 O60530 HYPOTHETICAL | | | | | |
| | | | | 38.4 KD PROTEIN (plus/minus) | | | | | |
| | 3170185 | | | Flu PB1 | Influenze RNA-dependent RNA polymera | −0.1 | 0.76 | 35 | 49 |
| PCP0495 | 5454137 | NM_006311 | Nuclear | 5454137\|ref\|NM_006311.1 Homo sapiens nuclear receptor co-repressor 1 (NCOR1), mRNA | | | | | |
| 235, 236 | 5454137 | | | myb DNA- | Myb-like DNA-binding domain | 98.9 | 4.20E−28 | 625 | 670 |
| | | | | binding | | | | | |
| | 5454137 | | | RNA pol A | RNA polymerase alpha subunit | 2 | 0.071 | 307 | 341 |
| | 5454137 | | | spectrin | Spectrin repeat | 5.2 | 0.29 | 301 | 327 |
| PCP0384 | 13173405 | AF339086 | Cytoplasm | 13173405\|gb\|AF339086.1\|AF339086 Homo sapiens NADH dehydrogenase subunit 5 | | | | | |
| | | | | (MTND5) mRNA, RNA 4, complete cds; mitochondrial gene for mitochondrial product | | | | | |
| 237, 238 | 13173405 | | | oxidored q1 | NADH-Ubiquinone/plastoquinone | 381.5 | 4.50E− | 134 | 420 |
| | | | | | (comp1) | | 112 | | |
| | 13173405 | | | oxidored q1 N | NADH-Ubiquinone oxidoreductase (comp | 110.2 | 2.10E−30 | 62 | 123 |
| | 13173405 | | | Na Pi contrans | Na⁺/Pi-cotransporter | −160.7 | 0.41 | 217 | 585 |
| | 13173405 | | | UPF0032 | MttB family UPF0032 | −95.9 | 0.44 | 273 | 483 |
| | 13173405 | | | ERG4 ERG24 | Ergosterol biosynthesis ERG4/ERG24 fa | −316.1 | 0.61 | 249 | 597 |
| | 13173405 | | | xan ur permease | Permease family | −195.1 | 0.72 | 209 | 536 |
| | 13173405 | | | ABC2 membrane | ABC-2 type transporter | −137.3 | 0.72 | 173 | 427 |
| | 13173405 | | | MVIN | Virulence factor MVIN | −260.3 | 0.8 | 63 | 529 |
| | 13173405 | | | sugar tr | Sugar (and other) transporter | −205.6 | 0.89 | 166 | 557 |
| | 13173405 | | | 7tm 3 | 7 Transmembrane receptor (metabotropi | −165.1 | 0.93 | 239 | 436 |

The application's sequence listing, which the Patent Office published only in electronic form, follows.

SEQUENCE LISTING (238 sequences)

SEQ ID NO: 1 - DNA, 1991 bp, Homo sapiens
  CDS (61)..(1839)
cgcggcggctggcgtcgggaaagtacagtaaaaagtccgagtgcagccgccgggcgcaggatgggatccggctcctccagctaccggcccaaggccatctacctggacatcgatggacgcattcagaaggtaatcttcagcaagtactgcaactccagcgacatcatggacctgttctgcatcgccaccggcctgcctcggaacacgaccatctccctgctgaccaccgacgacgccatggtctccatcgaccccaccatgcccgcgaattcagaacgcactccgtacaaagtgagacctgtggccatcaagcaactctccgctggtgtcgaggacaagagaaccacaagccgtggccagtctgctgagagaccactgagggacagacgggttgtgggcctggagcagccccggagggaaggagcatttgaaagtggacaggtagagcccaggcccagagagccccagggctgctaccaggaaggccagcgcatccctccagagagagaagaattaatccagagcgtgctggcgcaggttgcagagcagttctcaagagcattcaaaatcaatgaactgaaagctgaagttgcaaatcacttggctgtcctagagaaacgcgtggaattggaaggactaaaagtggtggagattgagaaatgcaagagtgacattaagaagatgagggaggagctggcggccagaagcagcaggaccaactgcccctgtaagtacagttttttggataaccacaagaagttgactcctcgacgcgatgttcccacttaccccaagtacctgctctctccagagaccatcgaggccctgcggaagccgacctttgacgtctggctttgggagcccaatgagatgctgagctgcctggagcacatgtaccacgacctcgggctggtcagggacttcagcatcaaccctgtcaccctcaggaggtggctgttctgtgtccacgacaactacagaaacaaccccttccacaacttccggcactgcttctgcgtggcccagatgatgtacagcatggtctggctctgcagtctccaggagaagttctcacaaacggatatcctgatcctaatgacagcggccatctgccacgatctggaccatcccggctacaacaacacgtaccagatcaatgcccgcacagagctggcggtccgctacaatgacatctcaccgctggagaaccaccactgcgccgtggccttccagatcctcgccgagcctgagtgcaacatcttctccaacatcccacctgatgggttcaagcagatccgacagggaatgatcacattaatcttggccactgacatggcaagacatgcagaaattatggattctttcaaagagaaaatggagaattttgactacagcaacgaggagcacatgaccctgctgaagatgattttgataaaatgctgtgatatctctaacgaggtccgtccaatggaagtcgcagagccttgggtggactgtttattagaggaatattttatgcagagcgaccgtgagaagtcagaaggccttcctgtggcaccgttcatggaccgagacaaagtgaccaaggccacagcccagattgggttcatcaagtttgtcctgatcccaatgtttgaaacagtgaccaagctcttccccatggttgaggagatcatgctgcagccactttgggaatcccgagatcgctacgaggagctgaagcggatagatgacgccatgaaagagttacagaagaagactgacagcttgacgtctggggccaccgagaagtccagagagagaagcagagatgtgaaaaacagtgaaggagactgtgcctgaggaaagcggggggcgtggctgcagttctggacgggctggccgagctgcgcgggatccttgtgcagggaagagctgccctgggcacctggcaccacaagaccatgttttctaagaaccattttgttcactgatacaaaaaaaaaaaaaaa

SEQ ID NO: 2 - protein, 593 aa, Homo sapiens
MGSGSSSYRPKAIYLDIDGRIQKVIFSKYCNSSDIMDLFCIATGLPRNTTISLLTTDDAMVSIDPTMPANSERTPYKVRPVAIKQLSAGVEDKRTTSRGQSAERPLRDRRVVGLEQPRREGAFESGQVEPRPREPQGCYQEGQRIPPEREELIQSVLAQVAEQFSRAFKINELKAEVANHLAVLEKRVELEGLKVVEIEKCKSDIKKMREELAARSSRTNCPCKYSFLDNHKKLTPRRDVPTYPKYLLSPETIEALRKPTFDVWLWEPNEMLSCLEHMYHDLGLVRDFSINPVTLRRWLFCVHDNYRNNPFHNFRHCFCVAQMMYSMVWLCSLQEKFSQTDILILMTAAICHDLDHPGYNNTYQINARTELAVRYNDISPLENHHCAVAFQILAEPECNIFSNIPPDGFKQIRQGMITLILATDMARHAEIMDSFKEKMENFDYSNEEHMTLLKMILIKCCDISNEVRPMEVAEPWVDCLLEEYFMQSDREKSEGLPVAPFMDRDKVTKATAQIGFIKFVLIPMFETVTKLFPMVEEIMLQPLWESRDRYEELKRIDDAMKELQKKTDSLTSGATEKSRERSRDVKNSEGDCA

SEQ ID NO: 3 - DNA, 1215 bp, Homo sapiens
  CDS (71)..(640)
gtgacattgagctcaccagcgccaccgtccccggcgaagttctgcgctggtcggcggagagcaagtggccatggggagcctcagcggtctgcgcctggcagcaggaagctgttttaggttatgtgaaagagatgtttcctcatctctaaggcttaccagaagctctgatttgaagagaataaatggattttgcacaaaaccacaggaaagtcccggagctccattcccgcacttacaacagagtgcctttacacaaacctacggattggcagaaaaagatcctcatatggtcaggtcgcttcaaaaggaagatgaaatcccagagactgtctcgttggagatgcttgatgctgcaaagaacaagatgcgagtgaagatcagctatctaatgattgccctgacggtggtaggatgcatctttcattggttattgagggcaagaagcttgcccaaagaccgagactttaaccagcttggacctttagaaaagaaagctcgtctgaaagaaggaagcagctatgaaggccaaaacagattaccaaaggtatccgtgttggttgggattttgaaaatccaggaattatgttttaacgtgcctgtattaaaaaggatgtggtatgaggatccatttcataaagtatgatttgcccaaacctgtaccatttccgtatttctgctgtagaagtagaaataaattttcttaaataatgactgtgttttattgttttgatccaagtcaagtgtagcctctcagccttttggagaaaaatgaaacaatttatttcaacttgaataccaactcttcagagaagcaggtaccatatcttacttctcttcccattatcaaagtaacctctccacaggcgaactcattttgaggagataaggaaggccagttgagtatatggcccaggtgcagcttggagggccagccttctcaaatgtcctggtgtactggtggggaggctgccccctaatagagcgagcgctgagaagcagccagaccacattctataatctttgaacatgctggcagatggaggcttttaggagaatagttttttaaacattctgacaaggtccagccaggaatttctaaggacttagaaatcccagtgtcatggagttgcttgggggtcaacacaagtcacctcttagcttcatgccttagaattctcaactgggctgtttttcttaccacctgagaaactaaat

SEQ ID NO: 4 - protein, 190 aa, Homo sapiens
MGSLSGLRLAAGSCFRLCERDVSSSLRLTRSSDLKRINGFCTKPQESPGAPFPHLQQSAFTQTYGLAEKDPHMVRSLQKEDEIPETVSLEMLDAAKNKMRVKISYLMIALTVVGCIFHWLLRARSLPKDRDFNQLGPLEKKARLKEGSSYEGQNRLPKVSVLVGILKIQELCFNVPVLKRMWYEDPFHKV

SEQ ID NO: 5 - DNA, 1909 bp, Homo sapiens
  CDS (928)..(1374)
ttttttttttttttttttttcaaggtttcaagttaatttaaggatttaatcatgtattttccaatggaggttacaatagagatttccaaacatggtttcagatttagaggagaaatattttctggttaagtggaaaattgggggatgtggcttctggagaccttcattctaaagcggttatgctgaaaatttcatttagtaaggacttcatggaatctcgttcatcacatttcaaatgccccttcattacataaattttatactagcatttaccatctcacttctaggaatactagtatatcgctcacacctcatatcctccctactatgcctagaaggaataatactatcgctgttcattatagctactctcataaccctcaacacccactccctcttagccaatattgtgcctattgccatactagtctttgccgcctgcgaagcagcggtgggcctagccctactagtctcaatctccaacacatatggcctagactacgtacataacctaagcctactccaatgctaaaactaatcgtcccaacaattatattactaccactgacatgactttccaaaaaacacataatttgaatcaacacaaccacccacagcctaattattagcatcatccctctactattttttaaccaaatcaacaacaacctatttagctgttccccaaccttttcctccgaccccctaacaacccccctcctaatactaactacctgactcctacccctcacaatcatggcaagccaacgccacttatccagtgaaccactatcacgaaaaaaatctctacctctcatactaatctcctaaaatctccttaattataacattcacagccacagaactaatcatattttatatcttcttcgaaaccacacttatccccaccttggctatcatcacccgatgaggcaaccagccagaacgcctgaacgcaggcacatacttcctattctacaccctagtaggctcccttcccctactcatcgcactaatttacactcacaacaccctaggctcactaaacattctactactcactctcactgcccaagaactatcaaactcctgagccaacaacttaatatgactagcttacacaatagcttttatagtaaagatacctctttacggactccacttattgatctccctaaagcccatgtcgaagcccccatcgctgggtcaatagtacttgccgcagtactcttaaaactaggcggctatgggtataatacgcctcacactcattctctcaaccccctgacaaaacacatagcctacccccttccttgtactatccctatgaggcataattataacaagctccatcttgcctacgacaaacagacctaaaatcgctcattgcatactcttcaatcagccacatagccctcgtagtaacagccattctcatccaaaccccctgaagcttcaccggcgcagtcattctcataatcgcccacggacttacatcctcattactattctgcctagcaaactcaaactacgaacgcactcacagtcgcatcataatcctctctcaaggacttcaaactctactcccactaatagctttttgatgacttctagcaagcctcgctaacctcgccttaccccccactattaacctactgggagaactctctgtgctagtaaccacgttctcctgatcaaatatcactctcctacttacaggactcaacatactagtcacagccctatactccctctacatatttaccacaacacaatggggctcactcacccaccacattaacaacataaaaccctcattcacacgagaaaacaccctcatgttcatacacctatcccccattctcctcctatccctcaaccccgacatcattaccgggttttcctctta

SEQ ID NO: 6 - protein, 149 aa, Homo sapiens [sequence omitted]

SEQ ID NO: 7 - DNA, 4137 bp, Homo sapiens
  CDS (218)..(1837)
gtgcaagcgattaagttgggtaacgcagggtttcccagtcacgacgtgtaaacgcggccagtgaatgtaatcgactcactataggcgaattgggccgacgtcgcatgctcccggccgccatggccgcgggattccatcctaatacgactcactatagggctcgacggccgcccgggcaggtcggtgtgaggagctgtgaaattagttgtaactgaaaatgtctgacggtctggataatgaagagaaacccccggctcctccactgaggatgaatagtacaccgggattcttcagcactcaaccacagctcctaccacttcccatggcccctgaagagaagaataagaaagccaggcttcgctctatcttcccaggaggaggggataaaaccaataagaagaaggagaaagagcgcccagagatctctcttccttcagactttgagcatacgattcatgtggggtttgatgcagtcaccggggaattcactggaattccagagcaatgggcacgattactccaaacttccaacataacaaaattggaacagaagaagaacccacaagctgttctagatgttctcaaattctatgattccaaagaaacagtcaacaaccagaaatacatgagctttacatcaggagataaaagtgcacatggatacatagcagcccatccttcgagtacaaaaacagcatctgagcctccattggcccctcctgtgtctgaagaagaagatgaagaggaagaagaagaagatgaaaatgagccaccaccagttatcgcaccaagaccagagcatacaaaatcaatctatactcgttctgtggttgaatccattgcttcaccagcagtaccaaataaagaggtcacaccaccctctgctgaaaatgccaattccagtactttgtacagaaacacagatcggcaaagaaaaaaatccaagatgacagatgaggagatcttagagaagctaagaagcattgtgagtgtggggacccaaagaaaaaatacacagtttgagaagattggacaagggccaatcaggcaccggtacacagcaatggatgtggccacaggacaggaggtggccattaagcagatgaatcttcagcagcagcccaagaaagagctgaatattaatgagatcctggtcatgagggaaaacaagaacccaaacattgtgaattacttggacagttacctcgtgggagatgagctgtgggttgttatggaatacttggctggaggctccttgacagatgtggtgacagaaacttgcatggatgaaggccaaattgcagctgtgtgccgtgagtgtctgcaggctctggagttcttgcattcgaaccaggtcattcacagagacatcaagagtgacaatattctgttgggaatggatggctctgtcaagctaactgactttggattctgtgcacagataaccccagagcagagcaaacggagcaccatggtaggaaccccatactggatggcaccagaggttgtgacacggaaagcctatgggcccaaggttgacatctggtccctgggcatcatggccatcgaaatggttgaaggggagcctccatacctcaatgaaaaccctctgagagccttgtacctcattgcaaccaatggaaccccagaacttcagaatccagagaaactttccccaatatttcgggatttcttaaatcgatgtttggaaatggatgtggaaaaaaggggttcagccaaagaattattacagcatcctttcctgaaactggccaaaccgttatctagcttgacaccactgatcatggcagctaaagaagcaatgaagagtaaccgttaacatcactgctgtggcctcatactcttttttccattttctacaagaagccttttagtatatgaaaattattactctttttggggttaaagaaatggtctgcataacctgaatggaaggagcaaatgactattctctgaagacaaccaagagaaaattgcaaaaagacaagtatgacttttatatgaaccccttctttagggtccagaaggaattgtggactgaatcactagccttaggtctttcagcaaacagcctatcagggccatttatcatgtgtgagatttgcattttactttgctgactttgttgtaatagatcccattcattgtcccctttgggtatttccaatacttgaatggcagattggagtttttcagagtatgtgtttcatctgctagtctttctctccttcatagcttttcttttcctggacttgctccttttgagttgcttttgcgtttctcatgcctaggcaagtgtaatagaaattatgtagctccttatgttggcaaaggagctctatatagtttcactttgtataaaagttaggaccagctgttgttacatgtaatattttagttcagaacttgacctgaaggaagggaagaaaagtatgtgatttttaccttttttaacaaatgtgaaaaagtcagttttagaaatttcgtggtagtaagttcggcatttgttacatgtatagagagaagactaataatctctatttataactaaatcattgagatagaaaaagattcccattgactgtagacttcttcccattttgtcttcccttctgcctgtttccccttcaggcttggctctaggaaccaaagtgatttgttgttgttccaacctgggctttgtgactttggttagtgccactaccttcttccctcctttcccccttcaatttggaaataaatttctgtatatgttgcaattttaggtttaggtttgttctttttctttttcattaatcctctctcacctcacagataccccctcccatggcaaataatataataaccagtgaattttcaggaatttaaaaattagcttttttccacttaaaggagaaaaatatttgggactagcagcagaggcagtaagagatgtgaaccttggtgagctctgatacagtgagaagagattatactcatgaaagagaatgttagtgttacagagaagcagccgatagcaaatcaactgtagagacttggcggcggtggcattgccccaggtcgtcagcagtgtggtattatctatgagaacttgagcgacagagtatttcttgatgaatttatagatcatttgagatgttgagttactttagtttagttttgttttgttttttcaaataagtagagactattgtaaaaaacgagaaaggaaaatgaaatgtgcgtgttgatagcaataatttgtttcttttaaagattctaaaaggtctgagacctgtagcattaattatttgagtgccctcccttctcccctcccctcccttttctcttctcttttttcctctcctctccttctcctttattcattgttttgcttttggagtaggtgttgttcaagtatctgtggtttggttctggcattttgttcccaccatccccttcccccattaacttcccccctgcttgccatcctgcagtagtataaatcatgaataaaaaataattttgctgttgtagtatacattggagaaactggcaggttttatttccattattttatttccactatatctatgataagatgcaattataaggagagaagtgactgttttttattgataaggcaagattttcagaaaaatgagtaaaataattaatgaaacatatttagagcacttaatggtctctgttttcaatataattcttgatttcatttttctctgggaatatattggccttctacagctattactgaattatagaaactggtttatttctggcagaaagctgcagtgccacctgagttccaaattttaccattctttgtaaacagttggatggattatgataaagaagatgctaccaatgaaatagaaaaccaacgagatgagaagactgtgatcctcatgtactcagaggcacttccctcctaagtcaaagaccatcctcactgactatgtgccaacgcctcgtttcaggcttgtgactcaacaaagggcttttccattgatagaagcagtttgggatttgtagttgcgacttcttcgatagttacctgcacgtccattgctggcaactgacttgtcattaaaacctggctctttggttaaggaaaaa

SEQ ID NO: 8 - protein, 540 aa, Homo sapiens [sequence omitted]

SEQ ID NO: 9 - DNA, 2400 bp, Homo sapiens
  CDS (364)..(1416)
gcggagcttccccgagcgagaccaaaacaggtggaatccgggctggagccggagctcgggcggcgcgggtggcggcacgtccctccagacagtaccacaggcacctggagtaccggcatcggtcgctgtggcccccgagtgtccgtcagagcctaggggagcctgccctcccgcgcctcgtcggggcccggccaggcaccttggccgccggcgcacggacgcgggcacgagcactagatcacggctgctggacctcggcacgttgacaagatttctctggggtaccgcggaggattactttgaatttcggtggtcgcctgtggtctggcatatttagaacttaagtctattatttcgggcaccatgactttgaggcttttagaagactggtgcagggggatggacatgaaccctcggaaagcgctattgattgccggcatctcccagagctgcagtgtggcagaaatcgaggaggctctgcaggctggtttagctcccttgggggagtacagactgcttggaaggatgttcaggagggatgagaacaggaaagtagccttagtagggcttactgcggagactagtcacgccctggtccctaaggagataccgggaaaagggggtatctggagagtgatctttaagccccctgacccagataatacatttttaagcagattaaatgaatttttagcgggagagggcatgacagtgggtgagttgagcagagctcttggacatgaaaatggctccttagacccagagcagggcatgatcccggaaatgtgggcccctatgttggcacaggcattagaggctcttcagcctgccctgcaatgcttgaagtataaaaagctgagagtgttctcgggcagggagtctccagaaccaggagaagaagaatttggacgctggatgtttcatactactcagatgataaaggcgtggcaggtgccagatgtagagaagagaaggcgattgctagagagccttcgaggcccagcacttgatgttattcgtgtcctcaagataaacaatcctttaattactgtcgatgaatgtctgcaggctcttgaggaggtatttggggttacagataatcctagggagttgcaggtcaaatatctaaccacttaccagaaggatgaggaaaagttgtcggcttatgtactaaggctggagcctttgttacagaagctggtacagagaggagcaattgagagagatgctgtgaatcaggcccgcctagaccaagtcattgctggggcagtccacaaaacaattcgcagagagcttaatctgccagaggatggcccagcccctggtttcttgcagttattggtactaataaaggattatgaggcagctgaggaggaggaggcccttctccaggcaatattggaaggtaatttcacctgagtctcagggaaccacgaagggatatggcaatgagtagagcatgaaggtagaacagtctatatactcttgtgacacatacaatccctaccttgtgctgccaagtaactcatttttgtgcaattctcagtataagccctttgtcgtttctgtgcctatttaaagtctcctaaaggtgtaattgactaggaaggatgtagttctacactgccatttacctatttaaattcatccttgtgaatatctttgttgttgttgttgagacagagtctcgctctgtcacccaggctggagtgcagtggcgtgatcttggctcactgcatcctccgccttccaggtttaagctattctcctgcctcagttgcccgagtagctgggactacaggcatgtgccaccacgcccagctaagttttgcattatcagtagagacggggtttcaccatgttggccaggctagtttcgaactcctgacctcaagtgatccacctgcttcggcctctgaaagtgctgggattacaggcgtgagacactgcgcccagcctcatccctgtgaatttcttattgtacacaagttctttcactatctgtgtgcagtgctctgaggggacagacaaggcttgggtgtatatgccaaccagatctcattgaagtatcagcttgtttggtactaggtgcaagtgtagcatgtcacatgtgaccatgttggatcattgacaatttttaggtatgtactgacctacatttatgatgaagatcctgagcggaggttaagatattaagttattttccatatgaatcagaattatattgattctgtgcaatcaaaacaaaaggcagaatagaatgctgagattggttaagtttgcaatgaccatcttgaaccacagatttctgctatgtgtcatcaaaacatctagttctgagtaacattttcacgattgttataaaattataggtgtgaacttctaaaataaaggaatgct

SEQ ID NO: 10 - protein, 351 aa, Homo sapiens
MTLRLLEDWCRGMDMNPRKALLIAGISQSCSVAEIEEALQAGLAPLGEYRLLGRMFRRDENRKVALVGLTAETSHALVPKEIPGKGGIWRVIFKPPDPDNTFLSRLNEFLAGEGMTVGELSRALGHENGSLDPEQGMIPEMWAPMLAQALEALQPALQCLKYKKLRVFSGRESPEPGEEEFGRWMFHTTQMIKAWQVPDVEKRRRLLESLRGPALDVIRVLKINNPLITVDECLQALEEVFGVTDNPRELQVKYLTTYQKDEEKLSAYVLRLEPLLQKLVQRGAIERDAVNQARLDQVIAGAVHKTIRRELNLPEDGPAPGFLQLLVLIKDYEAAEEEEALLQAILEGNFT

SEQ ID NO: 11 - DNA, 3414 bp, Homo sapiens
  CDS (321)..(1322)
gcttacacagtatggccggcgacattagctagcgctcgctctactctctctaacgggaaagcagcggaatacaagagactgaactgtatctgcctctatttccaaaagactcacgttcaactttcgctcacacaaagccgggaaaattttattagtcctttttttaaaaaaagttaatataaaattatagcaaaaaaaaaaaggaacctgaactttagtaacacagctggaacaatcgcagcggcggcggcagcggcgggagaagaggtttaatttagttgattttctgtggttgttggttgttcgctagtctcacggtgatggaagctgcacattttttcgaagggaccgagaagctgctggaggtttggttctcccggcagcagcccgacgcaaaccaaggatctggggatcttcgcactatcccaagatctgagtgggacatacttttgaaggatgtgcaatgttcaatcataagtgtgacaaaaactgacaagcaggaagcttatgtactcagtgagagtagcatgtttgtctccaagagacgtttcattttgaagacatgtggtaccaccctcttgctgaaagcactggttcccctgttgaagcttgctagggattacagtgggtttgactcaattcaaagcttcttttattctcgtaagaatttcatgaagccttctcaccaagggtacccacaccggaatttccaggaagaaatagagtttcttaatgcaattttcccaaatggagcaggatattgtatgggacgtatgaattctgactgttggtacttatatactctggatttcccagagagtcgggtaatcagtcagccagatcaaaccttggaaattctgatgagtgagcttgacccagcagttatggaccagttctacatgaaagatggtgttactgcaaaggatgtcactcgtgagagtggaattcgtgacctgataccaggttctgtcattgatgccacaatgttcaatccttgtgggtattcgatgaatggaatgaaatcggatggaacttattggactattcacatcactccagaaccagaattttcttatgttagctttgaaacaaacttaagtcagacctcctatgatgacctgatcaggaaagttgtagaagtcttcaagccaggaaaatttgtgaccaccttgtttgttaatcagagttctaaatgtcgcacagtgcttgcttcgccccagaagattgaaggttttaagcgtcttgattgccagagtgctatgttcaatgattacaattttgtttttaccagttttgctaagaagcagcaacaacagcagagttgattaagaaaaatgaagaaaaaacgcaaaaagagaacacatgtagaaggtggtggatgctttctagatgtcgatgctgggggcagtgctttccataaccaccactgtgtagttgcagaaagccctagatgtaatgatagtgtaatcattttgaattgtatgcattattatatcaaggagttagatatcttgcatgaatgctctcttctgtgtttaggtattctctgccactcttgctgtgaaattgaagtggatgtagaaaaaaccttttactatatgaaactttacaacacttgtgaaagcaactcaatttggtttatgcacagtgtaatatttctccaagtatcatccaaaattccccacagacaaggctttcgtcctcattaggtgttggcctcagcctaaccctctaggactgttctattaaattgctgccagaattttacatccagttacctccactttctagaacatattctttactaatgttattgaaaccaatttctacttcatactgatgtttttggaaacagcaattaaagtttttcttccatagttgagtccttagaaaatgattccagttactcattttgcatattgctatttaacattattggaccctgcatttatagtcctttgatttcttccctctccctggtgtctcccccaagaccccaaataaagcaataccctgttaacactgtgggtttatatactaattctataccccagatggggaattaggggggagatggtccctgggcttaatattctttaaagggcatgggaatttagcctctcttttattgtaatgtgctcttttggaaaatagttggttagcagggagaccagagttgtagattgagattgggtgtactggctgttctgtggaaaacatacattctgtgttcctcgaataagtgaaattgagcttctaatgagatgcacccctttactaacttgatgatgatataaaattcatttttatttagttaattaccagagagatttagcataattttgcttctggattcagtaaatcaagtcagcttggatcattcaccttaacttttcctttagcagccctttccactagtttcccattaagtagtgttctataaactttgatccaaagcagaatcaatgtcttttccatctcgtgacttaaagttctgtgactgtgatgcatgtgagtgttccgacttcatctgttcctcttaactacggtgtttcccttaccgatcggcattcataggatgaaatgaatgactgtcccagaatgagaatttgtccagattattcagataaacatcataaagagaataacattataaataagtagaatatgaataaatagaataataaaattccaaaatactcaatgggaaatgactagtaatataggctttcaagagttggtacctttacgtatatttgcagattctctgggattttaaggaactgagaaaacagaaaagttgactaaattttatatttcttgtcctctaaatattttgataatttctggattgatgcagtgatgtttttcgttccttgtatttataaatgaaaacctttttttggtgtttctaaacctaaaatctacttggtttgaaatcaagtggttggaacactgtttgacttttatttgaagcatgttgttgattgaaaatttcattgaggaagttttcaatcagtgtgatcagtttgattctgtaatgagcacagcacctaatattttgaggagctctgttttgaggaccaatgcttaaggtggaccttgttgctaaacaatatcccaatagatttgttgacttgaggtctggtttggttttgtttttgttttgttttggttttgttttgtttcccaatagaattaagaattctaatgttgaaaaactgtataaatttttatgggacaaagcctagaaaagagaaatgtagtttgaatcataatctaaatcatcgtatgataggaaggaaaagttttggtgccataatttctcctttcactggtgttggacttaaatcagttgaaatgtatttctgtaccacaatttacgcttcaataaaagtttaattgtctagtgag

SEQ ID NO: 12 - protein, 334 aa, Homo sapiens
MEAAHFFEGTEKLLEVWFSRQQPDANQGSGDLRTIPRSEWDILLKDVQCSIISVTKTDKQEAYVLSESSMFVSKRRFILKTCGTTLLLKALVPLLKLARDYSGFDSIQSFFYSRKNFMKPSHQGYPHRNFQEEIEFLNAIFPNGAGYCMGRMNSDCWYLYTLDFPESRVISQPDQTLEILMSELDPAVMDQFYMKDGVTAKDVTRESGIRDLIPGSVIDATMFNPCGYSMNGMKSDGTYWTIHITPEPEFSYVSFETNLSQTSYDDLIRKVVEVFKPGKFVTTLFVNQSSKCRTVLASPQKIEGFKRLDCQSAMFNDYNFVFTSFAKKQQQQQS

SEQ ID NO: 13 - DNA, 2392 bp, Homo sapiens
  CDS (390)..(1595)
aatcccctggcccaacccgtcatctactctaccatctttgcaggcacactcatcacagcgctaagctcgcactgattttttacctgagtaggcctagaaataaacatgctagcttttattccagttctaaccaaaaaaataaaccctcgttccacagaagctgccatcaagtatttcctcacgcaagcaaccgcatccataatccttctaatagctatcctcttcaacaatatactctccggacaatgaaccataaccaatactaccaatcaatactcatcactgatgaatcccctaatgattttggtaaaaatcattaagttaaggtggatacacatcttgtcatatgatcaaatggtttcgcgaaaaatcaataatcagacaacaagatgtgcgaactcgatattttacacgactctctttaccaattctgccccgaattacacttaaaacgactcaacagcttaacgttggcttgccacgcattacttgactgtaaaactctcactcttaccgaacttggccgtaacctgccaaccaaagcgagaacaaaacataacatcaaacgaatcgaccgattgttaggtaatcgtcacctccacaaagagcgactcgctgtataccgttggcatgctagctttatctgttcgggcaatacgatgcccattgtacttgttgactggtctgatattcgtgagcaaaaacgacttatggtattgcgagcttcagtcgcactacacggtcgttctgttactctttatgagaaagcgttcccgctttcagagcaatgttcaaagaaagctcatgaccaatttctagccgaccttgcgagcattctaccgagtaacaccacaccgctcattgtcagtgatgctggctttaaagtgccatggtataaatccgttgagaagctgggttggtactggttaagtcgagtaagaggaaaagtacaatatgcagacctaggagcggaaaactggaaacctatcagcaacttacatgatatgtcatctagtcactcaaagactttaggctataagaggctgactaaaagcaatccaatctcatgccaaattctattgtataaatctcgctctaaaggccgaaaaaatcagcgctcgacacggactcattgtcaccacccgtcacctaaaatctactcagcgtcggcaaaggagccatgggttctagcaactaacttacctgttgaaattcgaacacccaaacaacttgttaatatctattcgaagcgaatgcagattgaagaaaccttccgagacttgaaaagtcctgcctacggactaggcctacgccatagccgaacgagcagctcagagcgttttgatatcatgctgctaatcgccctgatgcttcaactaacatgttggcttgcgggcgttcatgctcagaaacaaggttgggacaagcacttccaggctaacacagtcagaaatcgaaacgtactctcaacagttcgcttaggcatggaagttttgcggcattctggctacacaataacaagggaagacttactcgtggctgcaaccctactagctcaaaatttattcacacatggttacgctttggggaaattatgaggggatctctcagtactcatcattaataatcataatggctatagcaataaaactaggaatagccccctttcacttctgagtcccagaggttgcccaaggcacccctctgacatccggcctgcttcttctcacatgacaaaaactagcccccatctcaatcatataccaaatctctccctcactaaacgtaagccttctcctcactctctcaatcttatccatcatagcaggcagttgaggtggattaaaccaaacccagctacgcaaaatcttagcatactcctcaattacccacataggatgaataatagcagttctaccgtacaaccctaacataaccattcttaatttaactatttatattatcctaactactaccgcattcctactactcaacttaaactccagcaccacgaccctactactatctcgcacctgaaacaagctaacatgactaacacccttaattccatccaccctcctctccctaggaggcctgcccccgctaaccggctttttgcccaaatgggccattatcgaagaattcacaaaaaacaatagcctcatcatccccaccatcatagccaccatcaccctccttaacctctacttctacctacgcctaatctactccacctcaatcacactactccccatatctaacaacgtaaaaataaaatgacagtttgaacatacaaaacccaccccattcctccccacactcatcgcccttaccacgctactcctacctatctccccttttatactaataatcttataaaaaaaaaaaaaaa

SEQ ID NO: 14 - protein, 402 aa, Homo sapiens
MCELDILHDSLYQFCPELHLKRLNSLTLACHALLDCKTLTLTELGRNLPTKARTKHNIKRIDRLLGNRHLHKERLAVYRWHASFICSGNTMPIVLVDWSDIREQKRLMVLRASVALHGRSVTLYEKAFPLSEQCSKKAHDQFLADLASILPSNTTPLIVSDAGFKVPWYKSVEKLGWYWLSRVRGKVQYADLGAENWKPISNLHDMSSSHSKTLGYKRLTKSNPISCQILLYKSRSKGRKNQRSTRTHCHHPSPKIYSASAKEPWVLATNLPVEIRTPKQLVNIYSKRMQIEETFRDLKSPAYGLGLRHSRTSSSERFDIMLLIALMLQLTCWLAGVHAQKQGWDKHFQANTVRNRNVLSTVRLGMEVLRHSGYTITREDLLVAATLLAQNLFTHGYALGKL

SEQ ID NO: 15 - DNA, 6581 bp, Homo sapiens
  CDS (1081)..(2811)
tgcggctgttaaacatagagtcatttgctttgatagtcatctgacagtctcttttgaagtttgacaagcttttacatgacccaagcctaaagagaaagccatttctttcctctattcagaagtgaactgaatgagtgtgtgcaggttcaactaagatctcataaagaagtaatctggattctaccttaatacagactaatagatgatcaaagccttgcagttctattatatcacatagggtattgtcatatttgttttaatctggatgagaaatattttaaaaatgtgtatcactttgagattttttaaaaatctcagtaatatctagccctcacaatgtaattgaccaaccaaaggaaacatcttttgactgacaagtgactgtttagggaacaagaataagttgacttactatctgagattgtcaagcatttagacagttaaatgttagtgtacaagtaggaccagacatttgaaaactatgactttaatgttaaattcttgcatctctctgaaagcaattatataatatggccagtaattgattcaggtcattctaattttgtgacagtgtttctgtatttatatacagatacagatttattttatttttgaatgattgattgctagtcaaaagaattagcatccatgtgttgccctactaaaagtagcctttatgtttcatcaaacttgttccagctaatccatattttagaggcactatttggaggccgaagcattaatacccaggaagtatattttaatatggcaaagagaactcaaagcggtttgcttagtatcaagaatattagcaaagtgaattaggggaaaagaagttttaattttgttttgtttttcttacagctttgccgggaagtaaagctttggaggaaaatcaatatcaatgaacgtgctaagatcattgatctttaccatgagaagaccattccagagaaagtgatagaatcttccccaaattaccccgatttaggacaaagtgaatttataaggacgaatcacaaagatggtctgagaaaagaaaataaaagagagcagagcttagtcagtggaggaaatcaaatgtgtaaggaacaaaaagcaacaaaaaaatcaaaagtagggtttttggatcctttggctacagacaaccaaaaggaatgtgaggcctggcctgacctgaggacttctgaggaagacagcaagagctgttctggcgccctcagtacagctcttgaagaacttgcgaaggtgagtgaagaattatgcagctttcaagaggaaattcgaaagcggtctaaccatagaaggatgaagtcagattcttttctccaggaaatgccaaatgtaactaatatacctcatggggaccccatgatcaacaatgaccagtgcattcttccaatcagtttagaaaaagaaaaacagaaaaataggaagaatctgagctgtaccaatgtgctccagagcaattctacgaaaaaatgtggaattgatacaatcgatttaaaaagaaatgaaactccaccagttcctcctccaagaagcacctctcgaaattttcccagctcggattctgaacaagcctatgaaagatggaaggaaaggttagaccacaacagctgggtgccccatgagggtcgaagtaaaaggaattacaaccctcacttccctttgagacaacaagagatgtctatgttgtatccaaatgaagggaaaacttcgaaagatggtatcatcttttcctctttggtaccagaagtcaaaatagatagcaagcctccaagtaatgaagatgttggacttagcatgtggtcatgtgacattgggataggtgcaaaaaggagcccctctacttcgtggtttcagaaaacctgctctacccccagtaatccaaaatatgaaatggtgatcccagatcaccctgctaaatctcatcctgatcttcatgtaagtaatgactgtagctcctcagtagcagagagcagtagcccacttagaaatttcagttgtggctttgaaaggactacaaggaatgagaagctggcagcaaagactgatgaatttaacagaactgtatttagaacagatagaaattgtcaggcaatacagcaaaatcacagctgctcaaaatcatcggaggatctcaagccctgtgatacctcatctactcacacaggtagcatatcacaaagtaacgatgtgtccggtatttggaaaaccaatgcccacatgcctgtgcccatggaaaatgtgcctgataatcccaccaagaaatccacaacaggcctagtaagacaaatgcagggacacctaagtcctcgcagttatcgaaatatgctccacgagcatgactggagaccgagtaatttgtctggccgtccgaggtcagctgatcccaggtcaaattatggtgttgtggaaaagctgctgaaaacctatgagacagcaacagagtctgcattgcaaaattctaagtgcttccaggataattggaccaaatgtaattctgatgtcagtggtggtgccacattaagtcagcatttagaaatgctccaaatggaacaacagtttcagcaaaagacagctgtgtgggggggacaggaagtgaagcaaggaatagatccgaaaaagataacagaggaatccatgtcagtgaacgcctcacatggaaaaggattttcccgacctgctagaccagcaaatcgtcgtctcccctccagatgggcatccagatctccatctgcaccccctgccttgcggagaactacccacaactataccatttctctgcgatccgaagcattgatggtttaagtctttggcctggattgctatattacagaagttctagtcccacttgtcaaacagagcattctgagtgtttacaggcggacctgttctcttccgacaagcaatttgaatcttaactttccatcagtcttcagtgtttttaatctaaggaataattatcttcctgcattttgatttcttagatcagaattttttaatgccatcctcattagttttccaatacaatataagttgaaacaatgtacaatattgtatattctttgttgcaagtggcagaaagtaaggttatgtgcatggccatgtgtttgtaggtgcatgtgttgaaataggaagtatcctagtatgtatttagatatgaaaaacttatgtgctagtgttgactttgaaattataacatgtatacctatatattctttgtgtttatttaaaagttttgaaaatatgcagtactgtttatattttgtataccttttaataggtatccacttaaggcatttgcagtacaaatattaattgaccacttccttggcccccagctacaatgaaaaagaagaattatgcacacatctaacattggtagatttctaaagacaactcataaataatttcttaacccatataaggataaaataataccattgatattcttgtttattctttttaaataaaaatgtcacaagtttaatagatcagccttgtaaagcaagcataaaatgttcataaatgttttatatattatttggtagtctagtatggctttaactgaatatttgatcctcagagacagtatcatgagactgcattataaatgacatgattaaatgatgaatttattttgtcagcctcagcaacaaacatttcctaaatgggatgcaaaaagaaactgaatgatgttgaattttagtttttctttaagttgtggtaagcttttagtttagctgctttaacatgaagtcatacatacttagaggtaagtcatttattatttttttcctttttctaatcttttccttaaaattaatagataacaaactaagttacttttttactaacaaggaagatcaggaataatatttctttgaaagctgaaattatacttctcacagtttgctaccaaaaaaaggcttaaactaaaccttgacatccacagtagcatcaggaatagaaatgtatattttggctacagtttgcatacagtgaacacataaaatctatattgaaaactgacagaaatatgaatgtcgaggggcttggaattctaaatggaagattttagaaggaactttgctctctactgtcactatataaaaccaattatgttatgttattagatattaactctatttaagcttttcttttactaagaaattcttatgccaaatgtattccaagagccatctccttatgatgtatttgaaccatttagagaaattcacttcattgtaccccatgacctgaggtaaagaaaataattttcaaattgcagacttccttgaaaggctcaagactgtagcatggtgatgtctagattcatactttactgtaaggacagtttcggtagttaagtggaattaaaggtctagagtgatttgtattggatggtaactaaggtctatacatctactcttttaattcttatttccttcaggaagatccttttccacaggaagctatcaaagaaaagtaaactagacaccaagtaatatcactctcataatatgctttccagctagaggggagaaaacaccaggaaagaggaaccctgggtcataaaatgacggacctgttaggaaaatgctgttgtgtgacaatggagagcctgcccaaggactgtgcaacctatctgttcctctccaccagtgtatcccaagtagtctggtatgatctgtggttccttagaatattgaggatctctttaaaaaatgaaatttctgatctcaccccatattactaaagcaaaatttccaggggtagggactgggactccagaaccattaataaaacaaaacaaaacaaagcaaaatattgatgatcaggcagatttgaaaacagtgacattgcttgatctctgaatggatggatgcccttgggtggtcacttttcttcctaggacttgcctttgttatctgtaaattagaatggctatactttcagacttcacaattttaagccacttttttctattaacagttgaatgaaccagtgggacacattttaacgtcttcttatgttgactaaaattatagttagagctgagaaaaaaaaaatagcatctagtccaactccttgattgtaaaactgaaaaactaaggttatttgaatgttctgttttctctttttaaatattttataacttttaaatggaaaaacctattaggtaaatggaaataatccttgaaaatagtttttgatgttttgtgatttttaactggtaaatttctactttaggtgggcattttcttccctagaatatgccctttattatgctatcattgctagatttaaagggacttgtaagcatttctggaaatatttgatttaaaaacatatattaatagatgttttccctagcagacttttggagcaaaaatattattttagttcagcagaggattactgatattatgggctgatctcagaaaggaataaggatgaggcagagaggagtacttgagtttgtgtgtgtgtgtgtgtgtgtgtgtttgtgtcagtgtcacataagttctccatattgccttatgtcccaaagccaaatataaaaatataaatgatgctttgtataattcattttatcaaaaattacccataactttcatttgtttttatatcgacaatgaagatgatcatatttcattttgcagatgtggccataaaatattatttacttctacataggtgattttaccaggtttagttatcctgagaaaacatctggacttaagagtttctgcttccctacaaagatctttaaagttatttttaggcacatttgtgacaaacaactacttgatattgaaatctccttcagccattagaagctatcaaataaagtaggtgtaaaaacaactgtctgtggcatttgtatacatcgagaacatttttctttccctcattttctgcagtgaactccagtaaagctaagtgtcttatgaaatctaaactcatatatgtacacagttcactctagcttcttccaaaatatctctaggtagtacaactgaagccaaacctgcctgacttcctgctcctggccacccaaaactccatatggcttctcgtacactgacatcctctctctacccatttaactgctaattgagtctgataaaagtcttctttgaaaaaagtttttacttctaagatttgcatttacatcataaaattaaacgattttcaggaaaatcagattttttttattacagtactatttgctttaaattcggcatgtttttcttaagtagcaagtacatgtatcggaacttagaactggtgggcgcggtggctcttgcctgtaatcccagcactttgggaggccaaggtggggggatcacgaggtcaggagatggagacaatcctggtttcatcacggtgaaaccccctctctgctaaaaatacaaaaaattagccaggcattgtggtggtcacctgtagtcccagctgctcgggagggtgaggcaggagaatggcatgaacccgggaggcagagcttgcagtgagcagagatcgcgccactgcactccagcctgggtgacagagtgagactctgtctc

SEQ ID NO: 16 - protein, 577 aa, Homo sapiens
MCKEQKATKKSKVGFLDPLATDNQKECEAWPDLRTSEEDSKSCSGALSTALEELAKVSEELCSFQEEIRKRSNHRRMKSDSFLQEMPNVTNIPHGDPMINNDQCILPISLEKEKQKNRKNLSCTNVLQSNSTKKCGIDTIDLKRNETPPVPPPRSTSRNFPSSDSEQAYERWKERLDHNSWVPHEGRSKRNYNPHFPLRQQEMSMLYPNEGKTSKDGIIFSSLVPEVKIDSKPPSNEDVGLSMWSCDIGIGAKRSPSTSWFQKTCSTPSNPKYEMVIPDHPAKSHPDLHVSNDCSSSVAESSSPLRNFSCGFERTTRNEKLAAKTDEFNRTVFRTDRNCQAIQQNHSCSKSSEDLKPCDTSSTHTGSISQSNDVSGIWKTNAHMPVPMENVPDNPTKKSTTGLVRQMQGHLSPRSYRNMLHEHDWRPSNLSGRPRSADPRSNYGVVEKLLKTYETATESALQNSKCFQDNWTKCNSDVSGGATLSQHLEMLQMEQQFQQKTAVWGGQEVKQGIDPKKITEESMSVNASHGKGFSRPARPANRRLPSRWASRSPSAPPALRRTTHNYTISLRSEALMV

SEQ ID NO: 17 - DNA, 2336 bp, Homo sapiens
  CDS (207)..(1040)
cttttcttccgcacggttggaggaggtcggctggttatcgggagttggagggctgaggtcgggagggtggtgtgtacagagctctaggactcacgcaccaggccagtcgcggattttgggccgaggcctgggttacaagcagcaagtgcgcggttggggccactgcgaggccgttttagaaaactgtttaaaacaaagagcaattgatggataaatcaggaatagattctcttgaccatgtgacatctgatgctgtggaacttgcaaatcgaagtgataactcttctgatagcagcttatttaaaactcagtgtatcccttactcacctaaaggggagaaaagaaaccccattcgaaaatttgttcgtacacctgaaagtgttcacgcaagtgattcatcaagtgactcatcttttgaaccaataccattgactataaaagctatttttgaaagattcaagaacaggaaaaagagatataaaaaaaagaaaaagaggaggtaccagccaacaggaagaccacggggaagaccagaaggaaggagaaatcctatatactcactaatagataagaagaaacaatttagaagcagaggatctggcttcccatttttagaatcagagaatgaaaaaaacgcaccttggagaaaaattttaacgtttgagcaagctgttgcaagaggattttttaactatattgaaaagctgaagtatgaacaccacctgaaagaatcattgaagcaaatgaatgttggtgaagatttagaaaatgaagattttgacagtcgtagatacaaatttttggatgatgatggatccatttctcctattgaggagtcaacagcagaggatgaggatgcaacacatcttgaagataacgaatgtgatatcaaattggcaggggatagtttcatagtaagttctgaattccctgtaagactgagtgtatacttagaagaagaggatattactgaagaagctgctttgtctaaaaagagagctacaaaagccaaaaatactggacagagaggcctgaaaatgtgacaggatcatgaatgtcaaaggcttttatcttgagaacatggtgtctggagttaaaggtattggcatactccacacatctgtaccattcttgagtgatcgcttaggaatgaatgtgatttgaactcattcatgttgagagggtgtcaaattgagaaccaggtagatccccaccacctacagtaaaaaggaccctaaagtaaattggttgaagaaattagatcccaaagattcttggtgaattttgaagtcttcatcagtatatccatattaaaacgagatgacagaagccaaagtaattatggcaagtaatggtttttatcttaactataagttatttgctcaagggtgtaatggtcattaccaaggcttttagaatgcagtttctcatttgctgtggacatgaccataaaaaaaaatttcccagtaggttttctatctgctacgttgctagcaatcagcttattgggaacagttgattaactgtaatagaaatgcaatacaaataaaatgtgaaccacatgtgatttttctttaaaatcagtgagatttgaaaattctcctagatctcttgaatcatgcaaatttgctttgcctttatattgtaacccttgtgggttgctaataaccaagcagtttgtagtagagttaactcaggctcgttctagggactcattcatgttcactcactgtacactcatctctggaaatgtaaaatttacttttatactattgttatgtagggctgacaggacaactggatcagtttcattaaaaaggtatgtatgcattagaaaagacatttgtatgggtcatttcaaagagggcttatgaggctgtgaaacccagagctcttaacgctgtgaccaaagatggaagttctctataggaagccatagcactcctaatgtttggtgctatgttttcctgaggagatataaaacgtaataatccatgattgttgccatgtgagagttttaaaggttaatcaaaatttctcttcttcagggcaaacttgaagataaatcttttgactccagctctttagaggatctaaagtgaccttgatggacagtggaagaaatcacaacatggaattcctcgaataacaatttattgactttaaataattttgtctaatgctacatatacacaattaaaaaacctttacactatttctagaaagtcagcatgtatttttggctcgaagtttctctagtgttttctgtggaaggaataaaaatttgagtttcaaaaaaaaaaaaaaaaaaaaaaaaaaaaaaaaaaaaaaaaaaa

SEQ ID NO: 18 - protein, 278 aa, Homo sapiens
MDKSGIDSLDHVTSDAVELANRSDNSSDSSLFKTQCIPYSPKGEKRNPIRKFVRTPESVHASDSSSDSSFEPIPLTIKAIFERFKNRKKRYKKKKKRRYQPTGRPRGRPEGRRNPIYSLIDKKKQFRSRGSGFPFLESENEKNAPWRKILTFEQAVARGFFNYIEKLKYEHHLKESLKQMNVGEDLENEDFDSRRYKFLDDDGSISPIEESTAEDEDATHLEDNECDIKLAGDSFIVSSEFPVRLSVYLEEEDITEEAALSKKRATKAKNTGQRGLKM

SEQ ID NO: 19 - DNA, 3414 bp, Homo sapiens; identical to SEQ ID NO: 11
  CDS (321)..(1322)

SEQ ID NO: 20 - protein, 334 aa, Homo sapiens; identical to SEQ ID NO: 12

SEQ ID NO: 21 - DNA, 723 bp, Homo sapiens
  CDS (1)..(720)
atgtccaaaccttcagaccacatcaagcggcccatgaacgccttcatggtatggtcccggggccagcggcgcaagatggcccaggaaaaccccaagatgcacaactcggagatcagcaaacgcctaggtgccgaatggaagcttctgtccgaggcagagaagcggccatacatcgatgaagccaagcggctacgcgcccagcacatgaaggagcaccctgactacaagtaccgacctcggcgcaagcccaagaacctgctcaagaaggacaggtatgtcttccccttgccctacctgggcgacacggacccgctcaaggcggctggcctgcccgtgggggcctccgacggcctcctgagcgcgcccgagaaagcccgggccttcttgccgccggcctcggcgccctactccctgctggaccccgcgcagtttagctcgagcgccatccagaagatgggcgaagtgccccacaccttggctaccggcgctctgccctacgcgtccaccctgggctaccagaacggcgccttcggcagcctcagctgccccagccagcacacgcacacgcacccgtcccccaccaaccctggctacgtggtgccctgtaactgtaccgcctggtctgcctccaccctgcagccccccgtcgcctacatcctcttcccaggcatgaccaagactggcatagacccttattcgtcagcccacgctacggccatgtaa

SEQ ID NO: 22 - protein, 240 aa, Homo sapiens
MSKPSDHIKRPMNAFMVWSRGQRRKMAQENPKMHNSEISKRLGAEWKLLSEAEKRPYIDEAKRLRAQHMKEHPDYKYRPRRKPKNLLKKDRYVFPLPYLGDTDPLKAAGLPVGASDGLLSAPEKARAFLPPASAPYSLLDPAQFSSSAIQKMGEVPHTLATGALPYASTLGYQNGAFGSLSCPSQHTHTHPSPTNPGYVVPCNCTAWSASTLQPPVAYILFPGMTKTGIDPYSSAHATAM

SEQ ID NO: 23 - DNA, 3074 bp, Homo sapiens
  CDS (28)..(2910)
gaattccggggagcaggaagagccaacatgctggccccgcgcggagccgccgtcctcctgctgcacctggtcctgcagcggtggctagcggcaggcgcccaggccaccccccaggtctttgaccttctcccatcttccagtcagaggctaaacccaggcgctctgctgccagtcctgacagaccccgccctgaatgatctctatgtgatttccaccttcaagctgcagactaaaagttcagccaccatcttcggtctttactcttcaactgacaacagtaaatattttgaatttactgtgatgggacgcttaagcaaagccatcctccgttacctgaagaacgatgggaaggtgcatttggtggttttcaacaacctgcagctggcagacggaaggcggcacaggatcctcctgaggctgagcaatttgcagcgaggggccggctccctagagctctacctggactgcatccaggtggattccgttcacaatctccccagggcctttgctggcccctcccagaaacctgagaccattgaattgaggactttccagaggaagccacaggacttcttggaagagctgaagctggtggtgagaggctcactgttccaggtggccagcctgcaagactgcttcctgcagcagagtgagccactggctgccacaggcacaggggactttaaccggcagttcttgggtcaaatgacacaattaaaccaactcctgggagaggtgaaggaccttctgagacagcaggttaaggaaacatcatttttgcgaaacaccatagctgaatgccaggcttgcggtcctctcaagtttcagtctccgaccccaagcacggtggtcgccccggctccccctgcaccgccaacacgcccacctcgtcggtgtgactccaacccatgtttccgaggtgtccaatgtaccgacagtagagatggcttccagtgtgggccctgccccgagggctacacaggaaacgggatcacctgtattgatgttgatgagtgcaaataccatccctgctacccgggcgtgcactgcataaatttgtctcctggcttcagatgtgacgcctgcccagtgggcttcacagggcccatggtgcagggtgttgggatcagttttgccaagtcaaacaagcaggtctgcactgacattgatgagtgtcgaaatggagcgtgcgttcccaactcgatctgcgttaatactttgggatcttaccgctgtgggccttgtaagccggggtatactggtgatcagataaggggatgcaaagtggaaagaaactgcagaaacccagagctgaacccttgcagtgtgaatgcccagtgcattgaagagaggcagggggatgtgacatgtgtgtgtggagtcggttgggctggagatggctatatctgtggaaaggatgtggacatcgacagttaccccgacgaagaactgccatgctctgccaggaactgtaaaaaggacaactgcaaatatgtgccaaattctggccaagaagatgcagacagagatggcattggcgacgcttgtgacgaggatgctgacggagatgggatcctgaatgagcaggataactgtgtcctgattcataatgtggaccaaaggaacagcgataaagatatctttggggatgcctgtgataactgcctgagtgtcttaaataacgaccagaaagacaccgatggggatggaagaggagatgcctgtgatgatgacatggatggagatggaataaaaaacattctggacaactgcccaaaatttcccaatcgtgaccaacgggacaaggatggtgatggtgtgggggatgcctgtgacagttgtcctgatgtcagcaaccctaaccagtctgatgtggataatgatctggttggggactcctgtgacaccaatcaggacagtgatggagatgggcaccaggacagcacagacaactgccccaccgtcattaacagtgcccagctggacaccgataaggatggaattggtgacgagtgtgatgatgatgatgacaatgatggtatcccagacctggtgccccctggaccagacaactgccggctggtccccaacccagcccaggaggatagcaacagcgacggagtgggagacatctgtgagtctgactttgaccaggaccaggtcatcgatcggatcgacgtctgcccagagaacgcagaggtcaccctgaccgacttcagggcttaccagaccgtgggcctggatcctgaaggggatgcccagatcgatcccaactgggtggtcctgaaccagggcatggagattgtacagaccatgaacagtgatcctggcctggcagtggggtacacagcttttaatggagttgacttcgaagggaccttccatgtgaatacccagacagatgatgactatgcaggctttatctttggctaccaagatagctccagcttctacgtggtcatgtggaagcagacggagcagacatattggcaagccaccccattccgagcagttgcagaacctggcattcagctcaaggctgtgaagtctaagacaggtccaggggagcatctccggaactccctgtggcacacgggggacaccagtgaccaggtcaggctgctgtggaaggactccaggaatgtgggctggaaggacaaggtgtcctaccgctggttcctacagcacaggccccaggtgggctacatcagggtacgattttatgaaggctctgagttggtggctgactctggcgtcaccatagacaccacaatgcgtggaggccgacttggcgttttctgcttctctcaagaaaacatcatctggtccaacctcaagtatcgctgcaatgacaccatccctgaggacttccaagagtttcaaacccagaatttcgaccgcttcgataattaaaccaaggaagcaatctgtaactgcttttcggaacactaaaaccatatatattttaacttcaattttctttagcttttaccaacccaaatatatcaaaacgttttatgtgaatgtggcaataaaggagaagagatcatttttaaaaaaaaaaaaaaaaaaaa

SEQ ID NO: 24 - protein, 961 aa, Homo sapiens
MLAPRGAAVLLLHLVLQRWLAAGAQATPQVFDLLPSSSQRLNPGALLPVLTDPALNDLYVISTFKLQTKSSATIFGLYSSTDNSKYFEFTVMGRLSKAILRYLKNDGKVHLVVFNNLQLADGRRHRILLRLSNLQRGAGSLELYLDCIQVDSVHNLPRAFAGPSQKPETIELRTFQRKPQDFLEELKLVVRGSLFQVASLQDCFLQQSEPLAATGTGDFNRQFLGQMTQLNQLLGEVKDLLRQQVKETSFLRNTIAECQACGPLKFQSPTPSTVVAPAPPAPPTRPPRRCDSNPCFRGVQCTDSRDGFQCGPCPEGYTGNGITCIDVDECKYHPCYPGVHCINLSPGFRCDACPVGFTGPMVQGVGISFAKSNKQVCTDIDECRNGACVPNSICVNTLGSYRCGPCKPGYTGDQIRGCKVERNCRNPELNPCSVNAQCIEERQGDVTCVCGVGWAGDGYICGKDVDIDSYPDEELPCSARNCKKDNCKYVPNSGQEDADRDGIGDACDEDADGDGILNEQDNCVLIHNVDQRNSDKDIFGDACDNCLSVLNNDQKDTDGDGRGDACDDDMDGDGIKNILDNCPKFPNRDQRDKDGDGVGDACDSCPDVSNPNQSDVDNDLVGDSCDTNQDSDGDGHQDSTDNCPTVINSAQLDTDKDGIGDECDDDDDNDGIPDLVPPGPDNCRLVPNPAQEDSNSDGVGDICESDFDQDQVIDRIDVCPENAEVTLTDFRAYQTVGLDPEGDAQIDPNWVVLNQGMEIVQTMNSDPGLAVGYTAFNGVDFEGTFHVNTQTDDDYAGFIFGYQDSSSFYVVMWKQTEQTYWQATPFRAVAEPGIQLKAVKSKTGPGEHLRNSLWHTGDTSDQVRLLWKDSRNVGWKDKVSYRWFLQHRPQVGYIRVRFYEGSELVADSGVTIDTTMRGGRLGVFCFSQENIIWSNLKYRCNDTIPEDFQEFQTQNFDRFDN

SEQ ID NO: 25 - DNA, 4049 bp, Homo sapiens
  CDS (63)..(614)
gcggccgcactcagcgccacgcgtcgaaagcgcaggccccgaggacccgccgcactgacagtatgagccgcacagcctacacggtgggagccctgcttctcctcttggggaccctgctgccggctgctgaagggaaaaagaaagggtcccaaggtgccatccccccgccagacaaggcccagcacaatgactcagagcagactcagtcgccccagcagcctggctccaggaaccgggggcggggccaagggcggggcactgccatgcccggggaggaggtgctggagtccagccaagaggccctgcatgtgacggagcgcaaatacctgaagcgagactggtgcaaaacccagccgcttaagcagaccatccacgaggaaggctgcaacagtcgcaccatcatcaaccgcttctgttacggccagtgcaactctttctacatccccaggcacatccggaaggaggaaggttcctttcagtcctgctccttctgcaagcccaagaaattcactaccatgatggtcacactcaactgccctgaactacagccacctaccaagaagaagagagtcacacgtgtgaagcagtgtcgttgcatatccatcgatttggattaagccaaatccaggtgcacccagcatgtcctaggaatgcagccccaggaagtcccagacctaaaacaaccagattcttacttggcttaaacctagaggccagaagaacccccagctgcctcctggcaggagcctgcttgtgcgtagttcgtgtgcatgagtgtggatgggtgcctgtgggtgtttttagacaccagagaaaacacagtctctgctagagagcactccctattttgtaaacatatctgctttaatggggatgtaccagaaacccacctcaccccggctcacatctaaaggggcggggccgtggtctggttctgactttgtgtttttgtgccctcctggggaccagaatctcctttcggaatgaatgttcatggaagaggctcctctgagggcaagagacctgttttagtgctgcattcgacatggaaaagtccttttaacctgtgcttgcatcctcctttcctcctcctcctcacaatccatctcttcttaagttgatagtgactatgtcagtctaatctcttgtttgccaaggttcctaaattaattcacttaaccatgatgcaaatgtttttcattttgtgaagaccctccagactctgggagaggctggtgtgggcaaggacaagcaggatagtggagtgagaaagggagggtggagggtgaggccaaatcaggtccagcaaaagtcagtagggacattgcagaagcttgaaaggccaataccagaacacaggctgatgcttctgagaaagtcttttcctagtatttaacagaacccaagtgaacagaggagaaatgagattgccagaaagtgattaactttggccgttgcaatctgctcaaacctaacaccaaactgaaaacataaatactgaccactcctatgttcggacccaagcaagttagctaaaccaaaccaactcctctgctttgtccctcaggtggaaaagagaggtagtttagaactctctgcataggggtgggaattaatcaaaaacckcagaggctgaaattcctaatacctttcctttatcgtggttatagtcagctcatttccattccactatttcccataatgcttctgagagccactaacttgattgataaagatcctgcctctgctgagtgtacctgacagtaagtctaaagatgaragagtttagggactactctgttttagcaagaratattktgggggtctttttgttttaactattgtcaggagattgggctaragagaagacgacgagagtaaggaaataaagggrattgcctctggctagagagtaagttaggtgttaatacctggtagaaatgtaagggatatgacctccctttctttatgtgctcactgaggatctgaggggaccctgttaggagagcatagcatcatgatgtattagctgttcatctgctactggttggatggacataactattgtaactattcagtatttactggtaggcactgtcctctgattaaacttggcctactggcaatggctacttaggattgatctaagggccaaagtgcagggtgggtgaactttattgtactttggatttggttaacctgttttcttcaagcctgaggttttatatacaaactccctgaatactctttttgccttgtatcttctcagcctcctagccaagtcctatgtaatatggaaaacaaacactgcagacttgagattcagttgccgatcaaggctctggcattcagagaacccttgcaactcgagaagctgtttttatttcgtttttgttttgatccagtgctctcccatctaacaactaaacaggagccatttcaaggcgggagatattttaaacacccaaaatgttgggtctgattttcaaacttttaaactcactactgatgattctcacgctaggcgaatttgtccaaacacatagtgtgtgtgttttgtatacactgtatgaccccaccccaaatctttgtattgtccacattctccaacaataaagcacagagtggatttaattaagcacacaaatgctaaggcagaattttgagggtgggagagaagaaaagggaaagaagctgaaaatgtaaaaccacaccagggaggaaaaatgacattcagaaccagcaaacactgaatttctcttgttgttttaactctgccacaagaatgcaatttcgttaatggagatgacttaagttggcagcagtaatcttcttttaggagcttgtaccacagtcttgcacataagtgcagatttggctcaagtaaagagaatttcctcaacactaacttcactgggataatcagcagcgtaactaccctaaaagcatatcactagccaaagagggaaatatctgttcttcttactgtgcctatattaagactagtacaaatgtggtgtgtcttccaactttcattgaaaatgccatatctataccatattttattcgagtcactgatgatgtaatgatatattttttcattattatagtagaatatttttatggcaagatatttgtggtcttgatcatacctattaaaataatgccaaacaccaaatatgaattttatgatgtacactttgtgcttggcattaaaagaaaaaaacacacatcctggaagtctgtaagttgttttttgttactgtaggtcttcaaagttaagagtgtaagtgaaaaatctggaggagaggataatttccactgtgtggaatgtgaatagttaaatgaaaagttatggttatttaatgtaattattacttcaaatcctttggtcactgtgatttcaagcatgttttctttttctcctttatatgactttctctgagttgggcaaagaagaagctgacacaccgtatgttgttagagtcttttatctggtcaggggaaacaaaatcttgacccagctgaacatgtcttcctgagtcagtgcctgaatctttattttttaaattgaatgttccttaaaggttaacatttctaaagcaatattaagaaagactttaaatgttattttggaagacttacgatgcatgtatacaaacgaatagcagataatgatgactagttcacacataaagtccttttaaggagaaaatctaaaatgaaaagtggataaacagaacatttataagtgatcagttaatgcctaagagtgaaagtagttctattgacattcctcaagatatttaatatcaactgcattatgtattatgtctgcttaaatcatttaaaaacggcaaagaattatatagactatgaggtaccttgctgtgtaggaggatgaaaggggagttgatagtctcataaaactaatttggcttcaagtttcatgaatctgtaactagaatttaattttcaccccaataatgttctatatagcctttgctaaagagcaactaataaattaaacctattctttcaaaaaaaaa

SEQ ID NO: 26 - protein, 184 aa, Homo sapiens
MSRTAYTVGALLLLLGTLLPAAEGKKKGSQGAIPPPDKAQHNDSEQTQSPQQPGSRNRGRGQGRGTAMPGEEVLESSQEALHVTERKYLKRDWCKTQPLKQTIHEEGCNSRTIINRFCYGQCNSFYIPRHIRKEEGSFQSCSFCKPKKFTTMMVTLNCPELQPPTKKKRVTRVKQCRCISIDLD

SEQ ID NO: 27 - DNA, 2128 bp, Homo sapiens
  CDS (16)..(750)
ctggaaaccactgcaatgacattattcccagtgctgttgttcctggttgctgggctgcttccatcttttccagcaaatgaagataaggatcccgcttttactgctttgttaaccacccaaacacaagtgcaaagggagattgtgaataagcacaatgaactgaggagagcagtatctccccctgccagaaacatgctgaagatggaatggaacaaagaggctgcagcaaatgcccaaaagtgggcaaaccagtgcaattacagacacagtaacccaaaggatcgaatgacaagtctaaaatgtggtgagaatctctacatgtcaagtgcctccagctcatggtcacaagcaatccaaagctggtttgatgagtacaatgattttgactttggtgtagggccaaagactcccaacgcagtggttggacattatacacaggttgtttggtactcttcatacctcgttggatgtggaaatgcctactgtcccaatcaaaaagttctaaaatactactatgtttgccaatattgtcctgctggtaattgggctaatagactatatgtcccttatgaacaaggagcaccttgtgccagttgcccagataactgtgacgatggactatgcaccaatggttgcaagtacgaagatctctatagtaactgtaaaagtttgaagctcacattaacctgtaaacatcagttggtcagggacagttgcaaggcctcctgcaattgttcaaacagcatttattaaatacgcattacacaccgagtagggctatgtagagaggagtcagattatctacttagatttggcatctacttagatttaacatatactagctgagaaattgtaggcatgtttgatacacatttgatttcaaatgtttttcttctggatctgctttttattttacaaaaatatttttcatacaaatggttaaaaagaaacaaaatctataacaacaactttggatttttatatataaactttgtgatttaaatttactgaatttaattagggtgaaaattttgaaagttgtattctcatatgactaagttcactaaaaccctggattgaaagtgaaaattatgttcctagaacaaaatgtacaaaaagaacaatataattttcacatgaacccttggctgtagttgcctttcctagctccactctaaggctaagcatcttcaaagacgttttcccatatgctgtcttaattcttttcactcattcacccttcttcccaatcatctggctggcatcctcacaattgagttgaagctgttcctcctaaaacaatcctgacttttattttgccaaaatcaatacaatcctttgaattttttatctgcataaattttacagtagaatatgatcaaaccttcatttttaaacctctcttctctttgacaaaacttccttaaaaaagaatacaagataatataggtaaataccctccactcaaggaggtagaactcagtcctctcccttgtgagtcttcactaaaatcagtgactcacttccaaagagtggagtatggaaagggaaacatagtaactttacaggggagaaaaatgacaaatgacgtcttcaccaagtgatcaaaattaacgtcaccagtgataagtcattcagatttgttctagataatctttctaaaaattcataatcccaatctaattatgagctaaaacatccagcaaactcaagttgaaggacattctacaaaatatccctggggtattttagagtattcctcaaaactgtaaaaatcatggaaaataagggaatcctgagaaacaatcacagaccacatgagactaaggagacatgtgagccaaatgcaatgtgcttcttggatcagatcctggaacagaaaaagatcagtaatgaaaaaactgatgaagtctgaatagaatctggagtatttttaacagtagtgttgatttcttaatcttgacaaatatagcagggtaatgtaagatgataacgttagagaaactgaaactgggtgagggctatctaggaattctctgtactatcttaccaaattttcggtaagtctaagaaagcaatgcaaaataaaaagtgtcttgaaaaaaaaaaaaaaaaaaaaaaaaaaaaa

SEQ ID NO: 28 - protein, 245 aa, Homo sapiens
MTLFPVLLFLVAGLLPSFPANEDKDPAFTALLTTQTQVQREIVNKHNELRRAVSPPARNMLKMEWNKEAAANAQKWANQCNYRHSNPKDRMTSLKCGENLYMSSASSSWSQAIQSWFDEYNDFDFGVGPKTPNAVVGHYTQVVWYSSYLVGCGNAYCPNQKVLKYYYVCQYCPAGNWANRLYVPYEQGAPCASCPDNCDDGLCTNGCKYEDLYSNCKSLKLTLTCKHQLVRDSCKASCNCSNSIY

SEQ ID NO: 29 - DNA, 2867 bp, Homo sapiens
  CDS (17)..(685)
ggacacctgtgtcagcatgtgggacctggttctctccatcgccttgtctgtggggtgcactggtgccgtgcccctcatccagtctcggattgtgggaggctgggagtgtgagaagcattcccaaccctggcaggtggctgtgtacagtcatggatgggcacactgtgggggtgtcctggtgcacccccagtgggtgctcacagctgcccattgcctaaagaagaatagccaggtctggctgggtcggcacaacctgtttgagcctgaagacacaggccagagggtccctgtcagccacagcttcccacacccgctctacaatatgagccttctgaagcatcaaagccttagaccagatgaagactccagccatgacctcatgctgctccgcctgtcagagcctgccaagatcacagatgttgtgaaggtcctgggcctgcccacccaggagccagcactggggaccacctgctacgcctcaggctggggcagcatcgaaccagaggagttcttgcgccccaggagtcttcagtgtgtgagcctccatctcctgtccaatgacatgtgtgctagagcttactctgagaaggtgacagagttcatgttgtgtgctgggctctggacaggtggtaaagacacttgtggggtgagtcatccctactcccaacatctggaggggaaagggtgattctgggggtccacttgtctgtaatggtgtgcttcaaggtatcacatcatggggccctgagccatgtgccctgcctgaaaagcctgctgtgtacaccaaggtggtgcattaccggaagtggatcaaggacaccatcgcagccaacccctgagtgcccctgtcccacccctacctctagtaaatttaagtccacctcacgttctggcatcacttggcctttctggatgctggacacctgaagcttggaactcacctggccgaagctcgagcctcctgagtcctactgacctgtgctttctggtgtggagtccagggctgctatgaaaaggaatgggcagacacaggtgtatgccaatgtttctgaaatgggtataatttcgtcctctccttcggaacactggctgtctctgaagacttctcgctcagtttcagtgaggacacacacaaagacgtgggtgaccatgttgtttgtggggtgcagagatgggaggggtggggcccaccctggaagagtggacagtgacacaaggtggacactctctacagatcactgaggataagctggagccacaatgcatgaggcacacacacagcaaggatgacgctgtaaacatagcccacgctgtcctgggggcactgggaagcctagataaggccgtgagcagaaagaaggggaggatcctcctatgttgttgaaggagggactagggggagaaactgaaagctgattaattacaggaggtttgttcaggtcccccaaaccaccgtcagatttgatgatttcctagcaggacttacagaaataaagagctatcatgctgtggtttattatggtttgttacattgatgggatacatactgaaatcagcaaacaaaacagatgtatagattagagtgtggagaaaacagaggaaaacttgcagttacgaagactggcaacttggctttactaagttttcagactggcaggaagtcaaacctattaggctgaggaccttgtggagtgtagctgatccagctgatagaggaactagccaggtgggggcctttccctttggatggggggcatatctgacagttattctctccaagtggagacttacggacagcatataattctccctgcaaggatgtatgataatatgtacaaagtaattccaactgaggaagctcacctgatccttagtgtccaaggtttttactgggggtctgtaggacgagtatggagtacttgaataattgacctgaagtcctcagacctgaggttcctcagagttcaaacagatacagcatggtccagagtcccagatgtacaaaaacagggattcatcacaaatcccatctttagctagaagggtctggcatggcccaaggccccaagtatatcaaggcacttgggcagaacatgccaaggaatcaaatgtcatctcccaggagttattcaagggtgagccctttacttgggatgtacaggctttgagcagtgcagggctgctgagtcaaccttttattgtacaggggatgagggaaagggagaggatgaggaagcccccctggggatttggtttggtcttgtgatcaggtggtctatggggctatccctacaaagaagaatccagaaataggggcacattgaggaatgatactgagcccaaagagcattcaatcattgttttatttgccttcttttcacaccattggtgagggagggattaccaccctggggttatgaagatggttgaacaccccacacatagcaccggagatatgagatcaacagtttcttagccatagagattcacagcccagagcaggaggacgctgcacaccatgcaggatgacatgggggatgcgctcgggattggtgtgaagaagcaaggactgttagaggcaggctttatagtaacaagacggtggggcaaactctgatttccgtgggggaatgtcatggtcttgctttactaagttttgagactggcaggtagtgaaactcattaggctgagaaccttgtggaatgcagctgacccagctgatagaggaagtagccaggtgggagcctttcccagtgggtgtgggacatatctggcaagattttgtggcactcctggttacagatactggggcagcaaataaaactgaatcttgttttcagaccttaaaaaaaaaaaaaaaaaaaaa

SEQ ID NO: 30 - protein, 223 aa, Homo sapiens
MWDLVLSIALSVGCTGAVPLIQSRIVGGWECEKHSQPWQVAVYSHGWAHCGGVLVHPQWVLTAAHCLKKNSQVWLGRHNLFEPEDTGQRVPVSHSFPHPLYNMSLLKHQSLRPDEDSSHDLMLLRLSEPAKITDVVKVLGLPTQEPALGTTCYASGWGSIEPEEFLRPRSLQCVSLHLLSNDMCARAYSEKVTEFMLCAGLWTGGKDTCGVSHPYSQHLEGKG

SEQ ID NO: 31 - DNA, 4266 bp, Homo sapiens
  CDS (33)..(2003)
ccgggctgtgagtctctcgccgccggaggaagatgaggctgaagattgggttcatcttacgcagtttgctggtggtgggaagcttcctggggctagtggtcctctggtcttccctgaccccgcggccggacgacccaagcccgctgagcaggatgagggaagacagagatgtcaatgaccccatgcccaaccgaggcggcaatggactagctcctggggaggacagattcaaacctgtggtaccatggcctcatgttgaaggagtagaagtggacttagagtctattagaagaataaacaaggccaaaaatgaacaagagcaccatgctggaggagattcccagaaagatatcatgcagaggcagtatctcacatttaagcctcagacattcacctaccatgatcctgtgcttcgcccagggatcctcggtaactttgaacccaaagaacctgagcctcctggagtggttggtggccctggagagaaagccaagccattggttttgggaccagaattcaaacaagcaattcaagccagcattaaagagtttggatttaacatggtggcaagtgacatgatctcactggaccgcaacgtcaatgacttacgccaagaagaatgcaagtattggcattatgatgaaaacttgctcacttcgagcgttgtcattgtcttccataatgaaggatggtcaaccctcatgagaacagtccacagtgtaattaaaaggactccaaggaaatatttagcagaaattgtgttaattgacgatttcagtaataaagaacacttaaaagaaaaactggatgaatatattaagctgtggaatggcctagtgaaggtatttcgaaatgaaagaagggaaggtttaattcaagcacgaagtattggtgctcagaaggctaaacttggacaggttttgatataccttgatgcccactgtgaagtggcagttaactggtatgcaccacttgtagctcccatatctaaggacagaaccatttgcactgtgccgcttatagatgtcataaatggcaacacatatgaaattataccccaagggggtggtgatgaagatgggtatgcccgaggagcatgggattggagtatgctctggaaacgggtgcctctgacccctcaagagaagagactgagaaaaacaaaaactgaaccgtatcggtccccagccatggctgggggattatgtgccattgaacgagagttcttctttgaattgggtctctatgatccaagtctccagatttggggtggtgaaaactttgagatctcatacaagatatggcagtgtggtggcaaattattatttgttccttgttctcgtgttggacatatctaccgtcttgagggctggcaaggaaatcctccgcccatttatgttgggtcttctccaactctgaagaattatgttagagttgtggaggtttggtgggatgaatataaagactacttctatgctagtcgtcctgaatcgcaggcattaccatatggggatatatcggagctgaaaaaatttcgagaagatcacaactgccaaagttttaagtggttcatggaagaaatagcttatgatatcacctcacactaccctttgccacccaaaaatgttgactggggagaaatcagaggcttcgaaactgcttactgcattgatagcatgggaaaaacaaatggaggctttgttgaactaggaccctgccacaggatgggagggaatcagcttttcagaatcaatgaagcaaatcaactcatgcagtatgaccagtgtttgacaaagggagctgatggatcaaaagttatgattacacactgtaatctaaatgaatttaaggaatggcagtacttcaagaacctgcacagatttactcatattccttcaggaaagtgtttagatcgctcagaggtcctgcatcaagtattcatctccaattgtgactccagtaaaacgactcaaaaatgggaaatgaataacatccatagtgtttagagagaaaaaaataaaccaataacctacctactgacaagtaaatttatacaggactgaaaaccgcctggaaacctgctgcaactattgttattaactctgtatagctccaaacctggaacctcctgatcagtttgaaggacattgataaactgtgattttacaataacattatcatctgcagttactgtttacaagactgctttttaccttaaactttgtagatgtttacatcttttttgttgtgttttaaagatgatgttggtaatttgtgccttttagctctgttttattaaacagagttaaagcatgttgtcttctttgggattacactcaggggttctgaaaggcagtttgatttttatttttaacacacttgaaaaaaggttggagtaaccagactttcatatataacttggtgattatcaacctgttgtgtctttatttaattttacatctttttgaagcactgccacaggttattagccaaggtggccttccttcacagtcatgctgcttttttgaaaggtgaatttcaacacatttagtgcctctttcatttctcagtatatatttcaagagcttgtgatgaaatctataggatggtaatgatggacttgtcacctgtatggggaatacttttactactcagaaatgaatttatgtgctgccatttgctataaagttgaactttgtatggcttgaaaaagaaatgaccatatggaacatcccaaggctgtcccataagggttggaagttgtgtagcattcactcccttacctactggcattcccagtgccctctgtccatacctacttctaggattgcaaagggagtcttccaactagaagaaaaattgtccactgacatttgggatttacttttctccaatacctgccaatacagaaaactattatcagttgttattgttatcccttgaaaagcgagggtgacaaaaacaacaaaacaccgttataaacacatcaaaggttcattctgactgaggtaagactttccaagcccttgttagattaggccttataaaacttgtgtgcattataacctaagctgtgcaacctggtgaagccaagagtgaactgatgtttcatttatattttcatccaaatgacattatctgcacgtttttaaaatttaaaaacaaaggactatttaaaaatacagtttattaacaaacgtgaaactactttctgttacattaggtgttccctagtgtttcttaatttctttttagaaagtgtatttttattagtatttttccggtgaacagaagatttgtttggatttaaacatttactaagacagtacctattaggaaaaccaaatattgcaaatggtcaattcgattttaatttctcaaaagatactctgttatccagaagattaaaatgcctacattgagtgcttaaaaaaaaaaacaactgtgatgatgtgagcagaatggcaagtaagttaagcatttttgatcctgtaatcatggtatcattacaatgaaaggaattcacaaactactgccagaggaagtttgttttttaatttaagagggaaatataacctataaatttgtttcttccaagcttagctcttaaatttgggagactcaaagttaaacatcctcaacagagttttatttataattttgaattgtcaatttgtattttgctactgatctgtgatcaaccattttaactttcatctctagggatgtttaacatttataattgcaaaataaaccaactataaaaaaagaaactaagagagaattggtactttaattacttgtgtgtttgcaaataggctccattttccatgttgagtagattataaccttattaactaggcataggcctaagaaaggtggcaatgaactgtgcatgtaaattttaaatgggtactttgtgcaattcgttaaaagaagatactctatgaatatgattctatatattgaaatcagaaaacctaccaaacaaaaacatcagaagctgctgccataatgactattttctactgtaggctgctttggaaataattcccatatccttgctttgtaagttggtaatatcactatgcatttctacacattttataaatttgatttatgcagattttgatacactgtatgtttctgtagaaattgtataaatattcaaaattttattaggataaatttgagaaacttacgtatatcttaattctgggttgcttgttttttaggtgacaaaaataaaatattgtattttaattc

SEQ ID NO: 32 - protein, 657 aa, Homo sapiens
MRLKIGFILRSLLVVGSFLGLVVLWSSLTPRPDDPSPLSRMREDRDVNDPMPNRGGNGLAPGEDRFKPVVPWPHVEGVEVDLESIRRINKAKNEQEHHAGGDSQKDIMQRQYLTFKPQTFTYHDPVLRPGILGNFEPKEPEPPGVVGGPGEKAKPLVLGPEFKQAIQASIKEFGFNMVASDMISLDRNVNDLRQEECKYWHYDENLLTSSVVIVFHNEGWSTLMRTVHSVIKRTPRKYLAEIVLIDDFSNKEHLKEKLDEYIKLWNGLVKVFRNERREGLIQARSIGAQKAKLGQVLIYLDAHCEVAVNWYAPLVAPISKDRTICTVPLIDVINGNTYEIIPQGGGDEDGYARGAWDWSMLWKRVPLTPQEKRLRKTKTEPYRSPAMAGGLCAIEREFFFELGLYDPSLQIWGGENFEISYKIWQCGGKLLFVPCSRVGHIYRLEGWQGNPPPIYVGSSPTLKNYVRVVEVWWDEYKDYFYASRPESQALPYGDISELKKFREDHNCQSFKWFMEEIAYDITSHYPLPPKNVDWGEIRGFETAYCIDSMGKTNGGFVELGPCHRMGGNQLFRINEANQLMQYDQCLTKGADGSKVMITHCNLNEFKEWQYFKNLHRFTHIPSGKCLDRSEVLHQVFISNCDSSKTTQKWEMNNIHSV

SEQ ID NO: 33 - DNA, 1464 bp, Homo sapiens
  CDS (42)..(824)
agccccaagcttaccacctgcacccggagagctgtgtcaccatgtgggtcccggttgtcttcctcaccctgtccgtgacgtggattggtgctgcacccctcatcctgtctcggattgtgggaggctgggagtgcgagaagcattcccaaccctggcaggtgcttgtggcctctcgtggcagggcagtctgcggcggtgttctggtgcacccccagtgggtcctcacagctgcccactgcatcaggaacaaaagcgtgatcttgctgggtcggcacagcctgtttcatcctgaagacacaggccaggtatttcaggtcagccacagcttcccacacccgctctacgatatgagcctcctgaagaatcgattcctcaggccaggtgatgactccagccacgacctcatgctgctccgcctgtcagagcctgccgagctcacggatgctgtgaaggtcatggacctgcccacccaggagccagcactggggaccacctgctacgcctcaggctggggcagcattgaaccagaggagttcttgaccccaaagaaacttcagtgtgtggacctccatgttatttccaatgacgtgtgtgcgcaagttcaccctcagaaggtgaccaagttcatgctgtgtgctggacgctggacagggggcaaaagcacctgctcgggtgattctgggggcccacttgtctgtaatggtgtgcttcaaggtatcacgtcatggggcagtgaaccatgtgccctgcccgaaaggccttccctgtacaccaaggtggtgcattaccggaagtggatcaaggacaccatcgtggccaacccctgagcacccctatcaaccccctattgtagtaaacttggaaccttggaaatgaccaggccaagactcaagcctccccagttctactgacctttgtccttaggtgtgaggtccagggttgctaggaaaagaaatcagcagacacaggtgtagaccagagtgtttcttaaatggtgtaattttgtcctctctgtgtcctggggaatactggccatgcctggagacatatcactcaatttctctgaggacacagataggatggggtgtctgtgttatttgtggggtacagagatgaaagaggggtgggatccacactgagagagtggagagtgacatgtgctggacactgtccatgaagcactgagcagaagctggaggcacaacgcaccagacactcacagcaaggatggagctgaaaacataacccactctgtcctggaggcactgggaagcctagagaaggctgtgagccaaggagggagggtcttcctttggcatgggatggggatgaagtaaggagagggactggaccccctggaagctgattcactatggggggaggtgtattgaagtcctccagacaaccctcagatttgatgatttcctagtagaactcacagaaataaagagctgttatactgtg

SEQ ID NO: 34 - protein, 261 aa, Homo sapiens
MWVPVVFLTLSVTWIGAAPLILSRIVGGWECEKHSQPWQVLVASRGRAVCGGVLVHPQWVLTAAHCIRNKSVILLGRHSLFHPEDTGQVFQVSHSFPHPLYDMSLLKNRFLRPGDDSSHDLMLLRLSEPAELTDAVKVMDLPTQEPALGTTCYASGWGSIEPEEFLTPKKLQCVDLHVISNDVCAQVHPQKVTKFMLCAGRWTGGKSTCSGDSGGPLVCNGVLQGITSWGSEPCALPERPSLYTKVVHYRKWIKDTIVANP

SEQ ID NO: 35 - DNA, 1603 bp, Homo sapiens
  CDS (38)..(577)
cgaagcttaccacctgcacccggagagctgtgtcaccatgtgggtcccggttgtcttcctcaccctgtccgtgacgtggattggtgctgcacccctcatcctgtctcggattgtgggaggctgggagtgcgagaagcattcccaaccctggcaggtgcttgtggcctctcgtggcagggcagtctgcggcggtgttctggtgcacccccagtgggtcctcacagctgcccactgcatcaggaacaaaagcgtgatcttgctgggtcggcacagcctgtttcatcctgaagacacaggccaggtatttcaggtcagccacagcttcccacacccgctctacgatatgagcctcctgaagaatcgattcctcaggccaggtgatgactccagccacgacctcatgctgctccgcctgtcagagcctgccgagctcacggatgctgtgaaggtcatggacctgcccacccaggagccagcactggggaccacctgctacgcctcaggctggggcagcattgaaccagaggagtgtacgcctgggccagatggtgcagccgggagcccagatgcctgggtctgagggaggaggggacaggactcctgggtctgagggaggagggccaaggaaccaggtggggtccagcccacaacagtgtttttgcctggcccgtagtcttgaccccaaagaaacttcagtgtgtggacctccatgttatttccaatgacgtgtgtgcgcaagttcaccctcagaaggtgaccaagttcatgctgtgtgctggacgctggacagggggcaaaagcacctgctcgggtgattctgggggcccacttgtctgtaatggtgtgcttcaaggtatcacgtcatggggcagtgaaccatgtgccctgcccgaaaggccttccctgtacaccaaggtggtgcattaccggaagtggatcaaggacaccatcgtggccaacccctgagcacccctatcaactccctattgtagtaaacttggaaccttggaaatgaccaggccaagactcaggcctccccagttctactgacctttgtccttaggtgtgaggtccagggttgctaggaaaagaaatcagcagacacaggtgtagaccagagtgtttcttaaatggtgtaattttgtcctctctgtgtcctggggaatactggccatgcctggagacatatcactcaatttctctgaggacacagataggatggggtgtctgtgttatttgtgggctacagagatgaaagaggggtgggatccacactgagagagtggagagtgacatgtgctggacactgtccatgaagcactgagcagaaagctggaggcacaacgcaccagacactcacagcaaggatggagctgaaaacataacccactctgtcctggaggcactgggaagcctagagaaggctgtgagccaaggagggagggtcttcctttggcatgggatggggatgaagtaaggagagggactggaccccctggaagctgattcactatggggggaggtgtattgaagtcctccagacaaccctcagatttgatgatttcctagtagaactcacagaaataaagagctgttatactgg

SEQ ID NO: 36 - protein, 180 aa, Homo sapiens
MWVPVVFLTLSVTWIGAAPLILSRIVGGWECEKHSQPWQVLVASRGRAVCGGVLVHPQWVLTAAHCIRNKSVILLGRHSLFHPEDTGQVFQVSHSFPHPLYDMSLLKNRFLRPGDDSSHDLMLLRLSEPAELTDAVKVMDLPTQEPALGTTCYASGWGSIEPEECTPGPDGAAGSPDAWV

SEQ ID NO: 37 - DNA, 6153 bp, Homo sapiens
gcctttgtcccctagatgaagtctccatgagctacagggcctggtgcatccagggtgatctagtaattgcagaacagcaagtgctagctctccctccccttccacagctctgggtgtgggagggggttgtccagcctccagcagcatggggagggccttggtcagcctctgggtgccagcagggcaggggcggagtcctggggaatgaaggttttatagggctcctgggggaggctccccagccccaagcttaccacctgcacccggagagctgtgtcaccatgtgggtcccggttgtcttcctcaccctgtccgtgacgtggattggtgagaggggccatggttggggggatgcaggagagggagccagccctgactgtcaagctgaggctctttcccccccaacccagcaccccagcccagacagggagctgggctcttttctgtctctcccagccccactccaagcccatacccccagcccctccatattgcaacagtcctcactcccacaccaggtccccgctccctcccacttaccccagaactttctccccatttgcccagccagctccctgctcccagctgctttactaaaggggaagttcctgggcatctccgtgtttctctttgtggggctcaaaacctccaaggacctctctcaatgccattggttccttggaccgtatcactggtccacctcctgagcccctcaatcctatcacagtctactgacttttccattcagctgtgagtgcccaaccctatcccagagaccttgatgcttggcctcccaatcttgccctaggatacccagatgccaaccagacacctccttcttcctagccaggctatctggctgagacaacaaatgggtccctcagtctggcaatgggactctgagaactcctcattccctgactcttagccccagactcttcattcagtggcccacattttccttaggaaaaacatgagcatccccagccacaactgccagctctctgattccccaaatctgcatccttttcaaaacctaaaaacaaaaagaaaaacaaataaaacaaaaccaactcagaccagaactgttttctcaacctgggacttcctaaactttccaaaaccttcctcttccagcaactgaacctcccgataaggcacttatccctggttcctagcaccgcttatcccctcagaatccacaacttgtaccaagtttcccttctcccagtccaagaccccaaatcaccacaaaggacccaatccccagactcaagatatggtctggggctgtcttgtgtctcctaccctgatccctgggttcaactctgtcccagagcatgaagcctctccaccagcaccagccaccaacctgcaaacctagggaagattgacagaattcccagcctttcccagctccccctgcccatgtcccaggactcccagccttggttctctgcccccgtgtcttttcaaacccacatcctaaatccatctcctatccgagtcccccagttcctcctgtcaaccctgattcccctgatctagcaccccctctgcaggtgctgcacccctcatcctgtctcggattgtgggaggctgggagtgcgagaagcattcccaaccctggcaggtgcttgtggcctctcgtggcagggcagtctgcggcggtgttctggtgcacccccagtgggtcctcacagctgcccactgcatcaggaagtgagtaggggcctggggtctggggagcaggtgtctgtgtccagaggaataacagctgggcattttccccaggataacctctaaggccagccttgggactgggggagagagggaaagttctggttcaggtcacatggggaggcagggttggggctggaccaccctccccatggctgcctgggtctccatctgtgttcctctatgtctctttgtgtcgctttcattatgtctcttggtaactggcttcggttgtgtctctccgtgtgactattttgttctctctctccctctcttctctgtcttcagtctccatatctccccctctctctgtccttctctggtccctctctagccagtgtgtctcaccctgtatctctctgccaggctctgtctctcggtctctgtctcacctgtgccttctccctactgagcacacgcatgggatgggcctggggggaccctgagaaaaggaagggctttggctgggcgcggtggctcacacctgtaatcccagcactttgggaggccaaggcaggtagatcacctgaggtcaggagttcgagaccagcctggccaactggtgaaaccccatctctactaaaaatacaaaaaattagccaggcgtggtcggcgcatgcctgtagtcccagctactcaggaggctgagggaggagaattgcttgaacctgggaggtggaggttgcagtgagccgagacgtgccactgcactccagcctgggtgacagagtgagactccgcctcaaaaaaaaaaaaaaaaaaaaagaaaagaaaagaaaagaaaaggaagtgttttatccctgatgtgtgtgggtatgagggtatgagagggcccctctcactccattccttctccaggacatccctccactcttgggagacacagagaagggctggttcagctggagctgggaggggcaattgagggaggaggaaggagaagggggaaggaaaacagggtatgggggaaaggaccctggggagcgaagtggaggatacaaccttgggcctgcaggccaggctacctacccacttggaaacccacgccaaagccgcatctacagctgagccactctgaggcctcccctccccagcggtccccactcagctccaaagtctctctcccttttctctcccacactctatcatcccccggattcctctctacttggttctcattcttcctttgacttcctgcttccctttctcattcatctgtttctcactttctgcctggttttgttcttctctctctctttctctggcccatgtctgtttctctatgtttctgtcttttctttctcatcctgtgtattttcggctcaccttgtttgtcactgttctcccctctgccctttcattctctctgtccttttaccctcttcctttttcccttggtttctctcagtttctgtatctgcccttcaccctctcacactgctgtttcccaactcgttgtctgtatttttggcctgaacatgtgtcttccccaaccctgtgtttttctcactgtttctttttctcttttggagcctcctccttgctcctctgtcccttctctctttccttatcatcctcgctcctcattcctgcgtctgcttcctccccagcaaaagcgtgatcttgctgggtcggcacagcctgtttcatcctgaagacacaggccaggtatttcaggtcagccacagcttcccacacccgctctacgatatgagcctcctgaagaatcgattcctcaggccaggtgatgactccagccacgacctcatgctgctccgcctgtcagagcctgccgagctcacggatgctgtgaaggtcatggacctgcccacccaggagccagcactggggaccacctgctacgcctcaggctggggcagcattgaaccagaggagtgtacgcctgggccagatggtgcagccgggagcccagatgcctgggtctgagggaggaggggacaggactcctaggtctgagggaggagggccaaggaaccaggtggggtccagcccacaacagtgttttttgcctggcccgtagtcttgaccccaaagaaacttcagtgtgtggacctccatgttatttccaatgacgtgtgtgcgcaagttcaccctcagaaggtgaccaagttcatgctgtgtgctggacgctggacagggggcaaaagcacctgctcggtgagtcatccctactcccaagatcttgaggggaaaggtgagtggggaccttaattctgggctggggtctagaagccaacaagcatctgcctcccctgctccccagctgtagccatgccacctccccgtgtctcatctcattccctccttccctcttctttgactccctcaaggcaataggttattcttacagcacaactcatctgttcctgcgttcagcacacggttactaggcacctgctatgcacccagcactgccctagagcctggacatagcagtgaacagacagagagcagcccctcccttctgtagcccccaagccagtgaggggcacaggcaggaacagggaccacaacacagaaaagctggagggtgtcaggaggtgatcaggctctcggggagggagaaggggtggggagtgtgactgggaggagacatcctgcagaaggcgggagtgagcaaacacctgccgcaggggaggggagggcctgcggcacctgggggagcagagggaacagcatctggccaggcctgggaggaggggcctagagggcgtcaggagcagagaggaggttgcctggctggagtgaaggatcggggcagggtgcgagagggaagaaggacccctcctgcagggcctcacctgggccacaggaggacactgcttttcctctgaggagtcaggaactgtggatggtgctggacagaagcaggacagggcctggctcaggtgtccagaggctgccgctggcctccctatgggatcagactgcagggagggagggcagcagggatgtggagggagtgatgatggggctgacctgggggtggctccaggcattgtccccacctgggcccttacccagcctccctcacaggctcctggccctcagtctctcccctccactccattctccacctacccacagtgggtcattctgatcaccgaactgaccatgccagccctgccgatggtcctccatggctccctagtgccctggagaggaggtgtctagtcagagagtagtcctggaaggtggcctctgtgaggagccacggggacagcatcctgcagatggtcctggcccttgtcccaccgacctgtctacaaggactgtcctcgtggaccctcccctctgcacaggagctggaccctgaagtcccttccccaccggccaggactggagcccctacccctctgttggaatccctgcccaccttcttctggaagtcggctctggagacatttctctcttcttccaaagctgggaactgctatctgttatctgcctgtccaggtctgaaagataggattgcccaggcagaaactgggactgacctatctcactctctccctgcttttacccttagggtgattctgggggcccacttgtctgtaatggtgtgcttcaaggtatcacgtcatggggcagtgaaccatgtgccctgcccgaaaggccttccctgtacaccaaggtggtgcattaccggaagtggatcaaggacaccatcgtggccaacccctgagcacccctatcaactccctattgtagtaaacttggaaccttggaaatgaccaggccaagactcaagcctccccagttctactgacctttgtccttaggtgtgaggtccagggttgctaggaaaagaaatcagcagacacaggtgtagaccagagtgtttcttaaatggtgtaattttgtcctctctgtgtcctggggaatactggccatgcctggagacatatcactcaatttctctgaggacacagataggatgggttgtctgtgttatttgtggggtacagagatgaaagaggggtggggatccacactgagagagtggagagtgacatgtgctggacactgtccatgaagcactgagcagaagctggaggcacaacgcaccagacactcacagcaaggatggagctgaaaacataacccactctgtcctggaggcactgggaagcctagagaaggctgtgagccaaggagggagggtcttcctttggcatgggatggggatgaagtaaggagagggactggaccccctggaagctgattcactatggggggaggtgtattgaagtcctccagacaaccctcagatttgatgatttcctagtagaactcacagaaataaagagctgttatactgtggtttattctggtttgttacattgacaggagacacactgaaatcagcaaaggaaacaggcatctaagtgg

SEQ ID NO: 38 - DNA, 8107 bp, Homo sapiens
  CDS (141)..(4133)
tgagggaagaagaggaagcgggaggagcttggcttcctcgcgtatttgaggacagcccatctcccttcaagaaccctacggagagtcggactgcatctccgcagcgagctcttggagcgccgccggccgggaggcgaaggatgcaggcggctccgcgcgccggctgcggggcagcgctcctgctgtggattgtcagcagctgcctctgcagagcctggacggctccctccacgtcccaaaaatgtgatgagccacttgtctctggactcccccatgtggctttcagcagctcctcctccatctctggtagctattctcccggctatgccaagataaacaagagaggaggtgctgggggatggtctccatcagacagcgaccattatcaatggcttcaggttgactttggcaatcggaagcagatcagtgccattgcaacccaaggaaggtatagcagctcagattgggtgacccaataccggatgctctacagcgacacagggagaaactggaaaccctatcatcaagatgggaatatctgggcatttcccggaaacattaactctgacggtgtggtccggcacgaattacagcatccgattattgcccgctatgtgcgcatagtgcctctggattggaatggagaaggtcgcattggactcagaattgaagtttatggctgttcttactgggctgatgttatcaactttgatggccatgttgtattaccatatagattcagaaacaagaagatgaaaacactgaaagatgtcattgccttgaactttaagacgtctgaaagtgaaggagtaatcctgcacggagaaggacagcaaggagattacattaccttggaactgaaaaaagccaagctggtcctcagtttaaacttaggaagcaaccagcttggccccatatatggccacacatcagtgatgacaggaagtttgctggatgaccaccactggcactctgtggtcattgagcgccaggggcggagcattaacctcactctggacaggagcatgcagcacttccgtaccaatggagagtttgactacctggacttggactatgagataacctttggaggcatccctttctctggcaagcccagctccagcagtagaaagaatttcaaaggctgcatggaaagcatcaactacaatggcgtcaacattactgatcttgccagaaggaagaaattagagccctcaaatgtgggaaatttgagcttttcttgtgtggaaccctatacggtgcctgtctttttcaacgctacaagttacctggaggtgcccggacggcttaaccaggacctgttctcagtcagtttccagtttaggacatggaaccccaatggtctcctggtcttcagtcactttgcggataatttgggcaatgtggagattgacctcactgaaagcaaagtgggtgttcacatcaacatcacacagaccaagatgagccaaatcgatatttcctcaggttctgggttgaatgatggacagtggcacgaggttcgcttcctagccaaggaaaattttgctattctcaccatcgatggagatgaagcatcagcagttcgaactaatagtccccttcaagttaaaactggcgagaagtacttttttggaggttttctgaaccagatgaataactcaagtcactctgtccttcagccttcattccaaggatgcatgcagctcattcaagtggacgatcaacttgtaaatttatacgaagtggcacaaaggaagccgggaagtttcgcgaatgtcagcattgacatgtgtgcgatcatagacagatgtgtgcccaatcactgtgagcatggtggaaagtgctcgcaaacatgggacagcttcaaatgcacttgtgatgagacaggatacagtggggccacctgccacaactctatctacgagccttcctgtgaagcctacaaacacctaggacagacatcaaattattactggatagatcctgatggcagcggacctctggggcctctgaaagtttactgcaacatgacagaggacaaagtgtggaccatagtgtctcatgacttgcagatgcagacgcctgtggtcggctacaacccagaaaaatactcagtgacacagctcgtttacagcgcctccatggaccagataagtgccatcactgacagtgccgagtactgcgagcagtatgtctcctatttctgcaagatgtcaagattgttgaacaccccagatggaagcccttacacttggtgggttggcaaagccaacgagaagcactactactggggaggctctgggcctggaatccagaaatgtgcctgcggcatcgaacgcaactgcacagatcccaagtactactgtaactgcgacgcggactacaagcaatggaggaaggatgctggtttcttatcatacaaagatcacctgccagtgagccaagtggtggttggagatactgaccgtcaaggctcagaagccaaattgagcgtaggtcctctgcgctgccaaggagacaggaattattggaatgccgcctctttcccaaacccatcctcctacctgcacttctctactttccaaggggaaactagcgctgacatttctttctacttcaaaacattaaccccctggggagtgtttcttgaaaatatgggaaaggaagatttcatcaagctggagctgaagtctgccacagaagtgtccttttcatttgatgtgggaaatgggccagtagagattgtagtgaggtcaccaacccctctcaacgatgaccagtggcaccgggtcactgcagagaggaatgtcaagcaggccagcctacaggtggaccggctaccgcagcagatccgcaaggccccaacagaaggccacacccgcctggagctctacagccagttatttgtgggtggtgctgggggccagcagggcttcctgggctgcatccgctccttgaggatgaatggggtgacacttgacctggaggaaagagcaaaggtcacatctgggttcatatccggatgctcgggccattgcaccagctatggaacaaactgtgaaaatggaggcaaatgcctagagagataccacggttactcctgcgattgctctaatactgcatatgatggaacattttgcaacaaagatgttggtgcattttttgaagaagggatgtggctacgatataactttcaggcaccagcaacaaatgccagagactccagcagcagagtagacaacgctcccgaccagcagaactcccacccggacctggcacaggaggagatccgcttcagcttcagcaccaccaaggcgccctgcattctcctctacatcagctccttcaccacagacttcttggcagtcctcgtcaaacccactggaagcttacagattcgatacaacctgggtggcacccgagagccatacaatattgacgtagaccacaggaacatggccaatggacagccccacagtgtcaacatcacccgccacgagaagaccatctttctcaagctcgatcattatccttctgtgagttaccatctgccaagttcatccgacaccctcttcaattctcccaagtcgctctttctgggaaaagttatagaaacagggaaaattgaccaagagattcacaaatacaacaccccaggattcactggttgcctctccagagtccagttcaaccagatcgcccctctcaaggccgccttgaggcagacaaacgcctcggctcacgtccacatccagggcgagctggtggagtccaactgcggggcctcgccgctgaccctctcccccatgtcgtccgccaccgacccctggcacctggatcacctggattcagccagtgcggattttccatataatccaggacaaggccaagctataagaaatggagtcaacagaaactcggctatcattggaggcgtcattgctgtggtgattttcaccatcctgtgcaccctggtcttcctgatccggtacatgttccgccacaagggcacctaccataccaacgaagcaaagggggcggagtcggcagagagcgcggacgccgccatcatgaacaacgaccccaacttcacagagaccattgatgaaagcaaaaaggaatggctcatttgaggggtggctacttggctatgggatagggaggagggaattactagggaggagagaaagggacaaaagcaccctgcttcatactcttgagcacatccttaaaatatcagcacaagttgggggaggcaggcaatggaatataatggaatattcttgagactgatcacaaaaaaaaaaaaaacctttttaatatttctttatagctgagttttcccttctgtatcaaaacaaaataatacaaaaaatgcttttagagtttaagcaatggttgaaatttgtaggtactatctgtcttattttgtgtgtgtttagaggtgttctaaagacccgtggtaacagggcaagttttctacgtttttaagagcccttagaacgtgggtattttttttcttgagaaaagctaatgcacctacagatggcccccaacattctcttccttttgcttctagtcaaccttaatgggctgttacagaaactagttcgtgtttatatactatttcctttgatgtcctataagtcggaaaagaaaggggcaaagagaacctattatttgccagtttttaagcagagctcaatctatgccagctctctggcatctggggttcctgactgataccagcagttgaaggaagagagtgcatggcacctggtgtgtaacgacacaatcagcacaactggagagaggcattaaagaaccagggaaggtagtttgatttttcattgaattctacaagctaatattgttccacgtatgtagtcttagaccaatagctgtaactatcagctgcaataccatggtgaccagctgttacaaaagattttttcctgttttatctgaaacatactggatttatatatgtataagcgcctcaatggggaattagagccagatgttatgatttgtttgctctttttcttttatagttatagcaaaaatatggataatttctagtgaatgcataaattaggttgcgtttcttattttgctttaaatctctggtagtttttccacccctgtgacacaatcctaatagacagtgtcctgtaaatggacacaacacaataaagtcaagttattattgctgttactctggatgatatggaaaacactgccatattttaaatcaactactccacgtgtttttccatccaatcacactgctgtgattcagggatctttcttctaaaacggacacatttgaacctcaggttcatcacaaacctggtacctgttgcttcccagaggatggagaagtgtagttaatcacacctcttagtttaatctgaaatcttgacccagttatttaacaaataaatacctcattgattatatttaaaagtaatacacttcctgtaaacaaatggggacaatgcatccaaaaaatctttttaaacagattacacaaaaattatttccagaaaggctaccatttatcatcattatatttcaagcctcttatacttaataagcactttctaaaaagtcttgagatcccaccattctgaggaattcaatatgatcactttttccttctttgcctgggagaggttaagaggcggtttcgaaggtatagatgctattgttctgatggcccggctgaataaaatggaaattctagtttgttagaattatgcattctttttcaagattctcagtgtgcctaacttattggagcacatcagtttcttgggtaatggaaaacattacctagagttgccagtggcacattacaccagtacagagcacattccaaaggagacattggaccagttaattcccatacaagtcaaggtaacagaacaaaagggaatcctgatgcccttttaccattgctggttgagctcaggcactgtcatggacacccttaattttaaaaggttttaatcattcttctataaaatacatttaaaatggaaaaatacttaatatcactaaatatcagaacaatgtaacatttacaaatgacatattgaaagcaaaggctgttttatttagccaagatgattaccattaggagttactttatgtattgttgaaagcaaattttaaacatgatgttttagaagtgtttctgatttttaaacctggtttacaggtattacttctgcacttaccaaataatgccagatggaaatttattatttcttgcaattcccgtgatagctctgttctttatgcattgtctcaacactttcccttttttcccaaaatgagtagagaattaaagccacccaaaacagcttctgctactaaaatgttctcatcctttctcctccctctccttttcctgccacaaaaggtgaaaaatgagatccaatcctctcaccaaaatttcaaacctaggacactggaatgactgcagggatcagtggttctcccatatcaccatcaattaagacatataggacactgtcttccttcaagagggttacaatgtggccatcagacaggaaaccaaacggtggataaagtattaagtaactaagtgccaaataaatgctggaaatcttgacctctccttgggattatgggtgtaacaaaaatccctacatctgtttatgaaggccatattcagtacattttaaatggtaaataatctgtttatgtgaagaaaaagaattaagtctttcttccaactctctccttggatagcctagcacagtgcagcctccataaccatgacattcccgcccaagctctcagtgcctaatcctgctttgtcattcacatctcacaaaatcttgacatcttacattccaatacattatcaagcaagcacaagtatgctggtagtagcctctttaaataatatgtatagacaacaacaacgacaaaaaatagactgttttaaagtttcagggaaagttggtggctgatttaaagttgtgcaggaaacatcttctgtgtatgaagcaaatgtcgatgttttgaaaagctaggagatgactttgaatgaatgcaaggttagtgagatcctaagctctcaaaatagcatattccctagagctcaagaaagctggtccaggaggttgaaaaagctattttgttgttaaattattttctggcccttcttaatatttaaaaatgtatttccccttgtggctttcaaccacctgctcaaaaaaagagacttgttacatgaaagttttcattaaagagctgaaaacaagaatttagagagccattcctagaaaatgtcctactgccctgcatttgacaaacaagcatcctttactaacaagagcaggaattcagaggcacaagaaaaagcattggcatgagccaaagagtctgtcttaatgttacttttgaaaatctgctgagcggccaccatatgcaggctgagagctgggcacaggcgaagccattggaagcacttcaggaacaagcacacagctgtgggacttgaacatgcaagtgttcaggttgtgtcaagaagcttttctttccttctatgatggaatctgttcttttctatcctacttttttctctcttcctctcctcaccacattataccctgctcttacgcagtaaacgttttaatggcccgtttatgtctcatgcctccaaacaacactgaatttgaaaccccccattttttcttttcaccaccctgttgagcaattttcccaaaaaaagggcagcaattattaaattgaattcaagtttctagattttactaagttttattttgtcaggttttttaaattttttcagtgagcgtggtgactgcagaggttagtgctgtgaaaagctgggctaaatattctttctgtaaagtcaaacaggattccatcccctgtgaaataacacaaaatttcactctctaaaagcaacagcatgtaaactagaatgaaagaaggaaattatgtacgtatgcctaatattctttgtgaatgtctttcatttaactaaaattatattagaaaccagattgataaataaaaaattcaaagtagttttaattatcct

SEQ ID NO: 39 - protein, 1331 aa, Homo sapiens
MQAAPRAGCGAALLLWIVSSCLCRAWTAPSTSQKCDEPLVSGLPHVAFSSSSSISGSYSPGYAKINKRGGAGGWSPSDSDHYQWLQVDFGNRKQISAIATQGRYSSSDWVTQYRMLYSDTGRNWKPYHQDGNIWAFPGNINSDGVVRHELQHPIIARYVRIVPLDWNGEGRIGLRIEVYGCSYWADVINFDGHVVLPYRFRNKKMKTLKDVIALNFKTSESEGVILHGEGQQGDYITLELKKAKLVLSLNLGSNQLGPIYGHTSVMTGSLLDDHHWHSVVIERQGRSINLTLDRSMQHFRTNGEFDYLDLDYEITFGGIPFSGKPSSSSRKNFKGCMESINYNGVNITDLARRKKLEPSNVGNLSFSCVEPYTVPVFFNATSYLEVPGRLNQDLFSVSFQFRTWNPNGLLVFSHFADNLGNVEIDLTESKVGVHINITQTKMSQIDISSGSGLNDGQWHEVRFLAKENFAILTIDGDEASAVRTNSPLQVKTGEKYFFGGFLNQMNNSSHSVLQPSFQGCMQLIQVDDQLVNLYEVAQRKPGSFANVSIDMCAIIDRCVPNHCEHGGKCSQTWDSFKCTCDETGYSGATCHNSIYEPSCEAYKHLGQTSNYYWIDPDGSGPLGPLKVYCNMTEDKVWTIVSHDLQMQTPVVGYNPEKYSVTQLVYSASMDQISAITDSAEYCEQYVSYFCKMSRLLNTPDGSPYTWWVGKANEKHYYWGGSGPGIQKCACGIERNCTDPKYYCNCDADYKQWRKDAGFLSYKDHLPVSQVVVGDTDRQGSEAKLSVGPLRCQGDRNYWNAASFPNPSSYLHFSTFQGETSADISFYFKTLTPWGVFLENMGKEDFIKLELKSATEVSFSFDVGNGPVEIVVRSPTPLNDDQWHRVTAERNVKQASLQVDRLPQQIRKAPTEGHTRLELYSQLFVGGAGGQQGFLGCIRSLRMNGVTLDLEERAKVTSGFISGCSGHCTSYGTNCENGGKCLERYHGYSCDCSNTAYDGTFCNKDVGAFFEEGMWLRYNFQAPATNARDSSSRVDNAPDQQNSHPDLAQEEIRFSFSTTKAPCILLYISSFTTDFLAVLVKPTGSLQIRYNLGGTREPYNIDVDHRNMANGQPHSVNITRHEKTIFLKLDHYPSVSYHLPSSSDTLFNSPKSLFLGKVIETGKIDQEIHKYNTPGFTGCLSRVQFNQIAPLKAALRQTNASAHVHIQGELVESNCGASPLTLSPMSSATDPWHLDHLDSASADFPYNPGQGQAIRNGVNRNSAIIGGVIAVVIFTILCTLVFLIRYMFRHKGTYHTNEAKGAESAESADAAIMNNDPNFTETIDESKKEWLI

SEQ ID NO: 40 - DNA, 1464 bp, Homo sapiens; identical to SEQ ID NO: 33
  CDS (42)..(824)

SEQ ID NO: 41 - protein, 261 aa, Homo sapiens; identical to SEQ ID NO: 34

SEQ ID NO: 42 - DNA, 4049 bp, Homo sapiens; identical to SEQ ID NO: 25
  CDS (63)..(614)

SEQ ID NO: 43 - protein, 184 aa, Homo sapiens; identical to SEQ ID NO: 26

SEQ ID NO: 44 - DNA, 2128 bp, Homo sapiens; identical to SEQ ID NO: 27
  CDS (16)..(750)

SEQ ID NO: 45 - protein, 245 aa, Homo sapiens; identical to SEQ ID NO: 28

SEQ ID NO: 46 - DNA, 4233 bp, Homo sapiens
  CDS (85)..(2664)
gagtagggccgagcgcggaacgcgaggggctgctggggtgtttgtcgcagcgggttttcctcggcggtttgcggagctgctaggatggagcaggttgcggagggagcaagggtgaccgcagtccctgtgtcagctgccgacagcactgaggagttggccgaagtcgaagaaggagttggagtagtgggcgaagataatgacgcagccgcgagaggagcggaggcctttggcgacagtgaggaggacggagaggatgtgttcgaggtggagaagatcctggacatgaagaccgaggggggtaaagttctttacaaagttcgctggaaaggctatacatcggatgatgatacctgggagcccgagattcacctggaggactgtaaagaagtgcttcttgaatttaggaagaaaattgcagagaacaaagccaaagcagtcaggaaggatattcagagactatccttaaataacgacatatttgaggcgaactctgatagcgatcagcaaagtgagacaaaagaagatacttccccaaagaagaaaaagaaaaaattgaggcagagagaagagaaaagcccagatgatctgaaaaagaaaaaagcaaaggccgggaagctaaaagacaagtccaaaccagacctggagagctccttggaaagtttagtttttgatttaaggacaaagaaaagaatttctgaagccaaagaagaactaaaggagtccaaaaagcccaaaaaagatgaagtaaaagaaacaaaagaattaaagaaagttaaaaagggtgaaataagagatttaaagacgaaaacaagagaagatcccaaagaaaatagaaaaacaaaaaaagaaaaatttgtcgaatcccaggtggaatctgaatcaagtgtacttaatgattctccctttccagaggatgacagtgaagggctacattccgacagcagagaagagaaacaaaacactaaaagtgcaagagagagagcagggcaggacatggggctggagcatggctttgagaagcccctagacagtgccatgagtgctgaggaggataccgatgtcagaggcaggaggaaaaagaagaccccgagaaaggctgaggacactagagagaacaggaagctagagaacaagaacgctttcttagagaagaaaactgtgcctaaaaagcagaggaatcaagacagaagcaaaagtgctgcagagttagagaagctgatgcctgtatctgcccaaacgccaaagggccggaggttgagcggggaagagagaggcctctggtccacggactcagccgaggaggacaaagaaaccaaaagaaatgaatccaaagaaaaatatcagaaaaggcatgattctgacaaggaagaaaaaggcagaaaagagccaaaaggattaaagacacttaaggaaatcagaaatgcatttgatttatttaaattaactccagaagaaaaaaatgatgtttctgagaataatcggaaaagggaagaaataccactggattttaaaaccatagacgatcacaaaaccaaggaaaacaaacagtcacttaaagaaaggagaaacaccagagacgaaacggatacttgggcatacattgctgcagaaggtgatcaggaggttttagacagcgtgtgccaagcagatgagaattcagatggcaggcagcagattctgagtttgggcatggacctgcagttggaatggatgaagttggaagatttccaaaagcaccttgatgggaaagatgagaattttgctgcaacagatgcaattccaagtaatgtgttaagggatgctgtgaaaaatggggattatattactgtaaaagttgcacttaattcaaatgaagaatataacctggaccaagaggattccagtggaatgacactggtgatgcttgccgccgccggagggcaggacgacctcctgcgactcctcatcacaaaaggcgcgaaagtgaacggtcggcagaagaacgggaccaccgccctcattcatgctgcagagaagaactttttaacaacagtggctattcttttggaagcaggagcttttgtaaatgtccagcaaagcaatggtgagactgcactgatgaaggcctgtaaaagaggaaattcagacatcgtacgactcgtaattgaatgtggagctgactgcaatattttgtcaaagcaccagaatagtgccctgcactttgcgaagcagtctaacaatgtgcttgtgtacgacttgctgaagaaccatttagagacactttcaagagtagcagaagagacaataaaggattactttgaagctcgccttgctctgctagaaccagtttttccaatcgcatgtcatcgactctgtgagggtccagatttttcaacagatttcaattacaaacccccacagaacataccagaaggctctggcatcctgctgtttatcttccatgcaaactttttgggtaaagaagttattgctcggctctgtggaccgtgtagtgtacaagctgtagttctgaatgataaatttcagcttcctgtttttctggacagtcattttgtttactcattcagccctgttgcaggtcccaataaactcttcataaggttgacagaagcaccctctgccaaggttaagttgctaataggtgcatacagagtgcagctgcagtgaccaaacagaagggactgggcggagttctcttcagaccgattcctatactctctttgacagcagtttggaattcttctagcacatctatgtaaagttttgtctgtaaacctcttgcagttaagcctgttgtctgttgtagtctgtaagatgcgacatagctgtgtctgtgccagtatgccggaatctcagtgcagtgtccagactgcgtatttcagtttttccacaatgtggatagtacatatgaggattatttaagaaaattaaagacttcactttcttttttctggagacggagtttcgctcttgttgcccaggctggagtgcaatggtgcgatctcggctcactgcaagctctgcctcctgggttcaagtgattctcctgcctcagcctcctgagtagctgggattacagacacccgccatggcacccagctaattttgtatttttagtagagatggggtttatccatgttggtcaggctggtcttgaactcctgacctcaggtgatccgcccgcctcggcctcccaaagtgcttggattacaggcatgagccaccgcacccagcaagagttattttcttaacttgaaattttctactagccctggtgaacttctgtgcttaaaaaaaaaaaaaaaaaaaggaaaaattcagctctaaaacatttgcttacagcaagggagccatgttatattcaagttacccaagcaccaaataaagtgtgggtttgctgcccttgaaagggttgggaggcctgatctttttctagtagacagttgccacacattccccaagcacaaaaggtggagatggcagtcactttgtaaatatgctgtagtcacttatcatcttttcaaagggtaacaagagaatctaagatgtagtaagaatgtaaaccagtacactatgagacctaaaagagagtattaaatgtgaacttttagcagagcgtggtggctcacacctataatcccagcgctttggaggctgaggttggaggattgcttaagtccaggagttcaagaccagcctgggtaacatggggtggaacaagcctgtagtcccagatactcaggaggctgaggtgaaaggattgcttgagccagggaggtcaaggctgcagtgagccgtgaaaggccactgcactccagcctgagtgacagaatgagaccttgtctcaaaaaaaaaaaaaagtttcttggaacctatacggtttttttttgttttttttttttgaaaagccagaccttgtgcccttgttttgaacaccgactgggaagatggggcttaggtaacagccaaacctggctgtcagctgtgtgggagccaccaccctctctgggaagagttcctgcttctgtatggcaagcataaatcaagctcagtctgggttatggagaagttgaaaattgttttgttcctcattagtttataattgtatgaaatacgattttaatgaaaacttttcagaattcacgtttgtgtagatatttcagagaaccatttttactttacatcctaaaactgccttttcctatggttttgtcaataaaacactatgatgtt

SEQ ID NO: 47 - protein, 860 aa, Homo sapiens
MEQVAEGARVTAVPVSAADSTEELAEVEEGVGVVGEDNDAAARGAEAFGDSEEDGEDVFEVEKILDMKTEGGKVLYKVRWKGYTSDDDTWEPEIHLEDCKEVLLEFRKKIAENKAKAVRKDIQRLSLNNDIFEANSDSDQQSETKEDTSPKKKKKKLRQREEKSPDDLKKKKAKAGKLKDKSKPDLESSLESLVFDLRTKKRISEAKEELKESKKPKKDEVKETKELKKVKKGEIRDLKTKTREDPKENRKTKKEKFVESQVESESSVLNDSPFPEDDSEGLHSDSREEKQNTKSARERAGQDMGLEHGFEKPLDSAMSAEEDTDVRGRRKKKTPRKAEDTRENRKLENKNAFLEKKTVPKKQRNQDRSKSAAELEKLMPVSAQTPKGRRLSGEERGLWSTDSAEEDKETKRNESKEKYQKRHDSDKEEKGRKEPKGLKTLKEIRNAFDLFKLTPEEKNDVSENNRKREEIPLDFKTIDDHKTKENKQSLKERRNTRDETDTWAYIAAEGDQEVLDSVCQADENSDGRQQILSLGMDLQLEWMKLEDFQKHLDGKDENFAATDAIPSNVLRDAVKNGDYITVKVALNSNEEYNLDQEDSSGMTLVMLAAAGGQDDLLRLLITKGAKVNGRQKNGTTALIHAAEKNFLTTVAILLEAGAFVNVQQSNGETALMKACKRGNSDIVRLVIECGADCNILSKHQNSALHFAKQSNNVLVYDLLKNHLETLSRVAEETIKDYFEARLALLEPVFPIACHRLCEGPDFSTDFNYKPPQNIPEGSGILLFIFHANFLGKEVIARLCGPCSVQAVVLNDKFQLPVFLDSHFVYSFSPVAGPNKLFIRLTEAPSAKVKLLIGAYRVQLQ

SEQ ID NO: 48 - DNA, 2848 bp, Homo sapiens
  CDS (503)..(2401)
ccttctccccggcggttagtgctgagagtgcggagtgtgtgctccgggctcggaacacacatttattattaaaaaatccaaaaaaaatctaaaaaaatcttttaaaaaaccccaaaaaaatttacaaaaaatccgcgtctcccccgccggagacttttattttttttcttcctcttttataaaataacccggtgaagcagccgagaccgacccgcccgcccgcggccccgcagcagctccaagaaggaaccaagagaccgaggccttcccgctgcccggacccgacaccgccaccctcgctccccgccggcagccggcagccagcggcagtggatcgaccccgttctgcggccgttgagtagttttcaattccggttgatttttgtccctctgcgcttgctccccgctcccctccccccggctccggcccccagccccggcactcgctctcctcctctcacggaaaggtcgcggcctgtgccctgcgggcagccgtgccgagatgaaccccagtgcccccagctaccccatggcctcgctctacgtgggggacctccaccccgacgtgaccgaggcgatgctctacgagaagttcagcccggccgggcccatcctctccatccgggtctgcagggacatgatcacccgccgctccttgggctacgcgtatgtgaacttccagcagccggcggacgcggagcgtgctttggacaccatgaattttgatgttataaagggcaagccagtacgcatcatgtggtctcagcgtgatccatcacttcgcaaaagtggagtaggcaacatattcattaaaaatctggacaaatccattgataataaagcactgtatgatacattttctgcttttggtaacatcctttcatgtaaggtggtttgtgatgaaaatggttccaagggctacggatttgtacactttgagacgcaggaagcagctgaaagagctattgaaaaaatgaatggaatgctcctaaatgatcgcaaagtatttgttggacgatttaagtctcgtaaagaacgagaagctgaacttggagctagggcaaaagaattcaccaatgtttacatcaagaattttggagaagacatggatgatgagcgccttaaggatctctttgggcctgccttaagtgtgaaagtaatgactgatgaaagtggaaaatccaaaggatttggatttgtaagctttgaaaggcatgaagatgcacagaaagctgtggatgagatgaacggaaaggagctcaatggaaaacaaatttatgttggtcgagctcagaaaaaggtggaacggcagacggaacttaagcgcaaatttgaacagatgaaacaagataggatcaccagataccagggtgttaatctttatgtgaaaaatcttgatgatggtattgatgatgaacgtctccggaaagagttttctccatttggtacaatcactagtgcaaaggttatgatggagggtggtcgcagcaaagggtttggttttgtatgtttctcctccccagaagaagccactaaagcagttacagaaatgaacggtagaattgtggccacaaagccattgtatgtagctttagctcagcgcaaagaagagcgccaggctcacctcactaaccagtatatgcagagaatggcaagtgtacgagctgttcccaaccctgtaatcaacccctaccagccagcacctccttcaggttacttcatggcagctatcccacagactcagaaccgtgctgcatactatcctcctagccaagttgctcaactaagaccaagtcctcgctggactgctcagggtgccagacctcatccattccaaaatatgcccggtgctatccgcccagctgctcctagaccaccatttagtactatgagaccagcttcttcacaggttccacgagtcatgtcaacacagcgtgttgctaacacatcaacacagacaatgggtccacgtcctgcagctgcagccgctgcagctactcctgctgtccgcaccgttccacagtataaatatgctgcaggagttcgcaatcctcagcaacatcttaatgcacagccacaagttacaatgcaacagcctgctgttcatgtacaaggtcaggaacctttgactgcttccatgttggcatctgcccctcctcaagagcaaaagcaaatgttgggtgaacggctgtttcctcttattcaagccatgcaccctactcttgctggtaaaatcactggcatgttgttggagattgataattcagaacttcttcatatgctcgagtctccagagtcactccgttctaaggttgatgaagctgtagctgtactacaagcccaccaagctaaagaggctgcccagaaagcagttaacagtgccaccggtgttccaactgtttaaaattgatcagggaccatgaaaagaaacttgtgcttcaccgaagaaaaatatctaaacatcgaaaaacttaaatattatggaaaaaaaacattgcaaaatataaaataaataaaaaaaggaaaggaaactttgaaccttatgtaccgagcaaatgccaggtctagcaaacataatgctagtcctagattacttattgatttaaaaacaaaaaaacacaaaaaatagtaaaatataaaaacaaattaatgttttatagaccctgggaaaaagaattttcagcaaagtacaaaaatttaaagcattcctttctttaattttgtaattctttactgtggaatagctcagaatgtcagttctgttttaagtaacagaattgataactgagcaaggaaacgtaatttggattataaaattcttgctttaataaaaattccttaaacagtg

SEQ ID NO: 49 - protein, 633 aa, Homo sapiens
MNPSAPSYPMASLYVGDLHPDVTEAMLYEKFSPAGPILSIRVCRDMITRRSLGYAYVNFQQPADAERALDTMNFDVIKGKPVRIMWSQRDPSLRKSGVGNIFIKNLDKSIDNKALYDTFSAFGNILSCKVVCDENGSKGYGFVHFETQEAAERAIEKMNGMLLNDRKVFVGRFKSRKEREAELGARAKEFTNVYIKNFGEDMDDERLKDLFGPALSVKVMTDESGKSKGFGFVSFERHEDAQKAVDEMNGKELNGKQIYVGRAQKKVERQTELKRKFEQMKQDRITRYQGVNLYVKNLDDGIDDERLRKEFSPFGTITSAKVMMEGGRSKGFGFVCFSSPEEATKAVTEMNGRIVATKPLYVALAQRKEERQAHLTNQYMQRMASVRAVPNPVINPYQPAPPSGYFMAAIPQTQNRAAYYPPSQVAQLRPSPRWTAQGARPHPFQNMPGAIRPAAPRPPFSTMRPASSQVPRVMSTQRVANTSTQTMGPRPAAAAAAATPAVRTVPQYKYAAGVRNPQQHLNAQPQVTMQQPAVHVQGQEPLTASMLASAPPQEQKQMLGERLFPLIQAMHPTLAGKITGMLLEIDNSELLHMLESPESLRSKVDEAVAVLQAHQAKEAAQKAVNSATGVPTV

SEQ ID NO: 50 - DNA, 3854 bp, Homo sapiens
  CDS (198)..(3755)
gccagagtctctccgctttaatgcgctcccattagtgccgtcccccactggaaaaccgtggcttctgtattatttgccatctttgttgtgtaggagcagggagggcttcctcccggggtcctaggcggcggtgcagtccgtcgtagaagaattagagtagaagttgtcggggtccgctcttaggacgcagccgcctcatgggggtccaggggctctggaagctgctggagtgctccgggcggcaggtcagccccgaagcgctggaagggaagatcctggctgttgatattagcatttggttaaaccaagcacttaaaggagtccgggatcgccatgggaactcaatagaaaatcctcatcttctcactttgtttcatcggctctgcaaactcttattttttcgaattcgtcctatttttgtgtttgatggggatgctccactattgaagaaacagactttggtgaagagaaggcagagaaaggacttagcgtccagtgactccaggaaaacgacagagaagcttctgaaaacatttttgaaaagacaagccatcaaaactgccttcagaagcaaaagagatgaagcactacccagtcttacccaagttcgaagagaaaacgacctctatgttttgcctcctttacaagaggaagaaaaacacagttcagaagaggaagatgaaaaagaatggcaagaaagaatgaatcaaaaacaagcattacaggaagagttctttcataatcctcaagcgatagatattgagtctgaggacttcagcagcctgccccctgaagtaaagcatgaaatcttgactgatatgaaagagttcaccaagcgcagaagaacattatttgaagcaatgccagaggagtctgatgacttttcacagtaccaactcaaaggcttgcttaaaaagaactatctgaaccagcatatagaacatgtccaaaaggaaatgaatcagcaacattcaggacacatccgaaggcagtatgaagatgaagggggctttctgaaggaggtagagtcaaggagagtggtctctgaagacacttcacattacatcttgataaaaggtattcaagctaagacagttgcagaagtggattcagagtctcttccttcttccagcaaaatgcacggcatgtcttttgacgtgaagtcatctccatgtgaaaaactgaagacagagaaagagcctgatgctacccctccttctccaagaactttactagctatgcaagctgccctgctgggaagtagctcagaagaggagctggagagtgaaaatcgaaggcaggcccgtgggaggaacgcacctgctgctgtagacgaaggctccatatcaccccggactctttcagccattaagagagctcttgacgatgacgaagatgtaaaagtgtgtgctggggatgatgtgcagacgggagggccaggagcagaagaaatgcgtataaacagctccaccgagaacagtgatgaaggacttaaagtgagagatggaaaaggaataccgtttactgcaacacttgcgtcatctagtgtgaactctgcagaggagcacgtagccagcactaatgaggggagagagcccacagactcagttccaaaagaacaaatgtcacttgttcacgtggggactgaagcctttccgataagtgatgagtctatgattaaggacagaaaagatcggctgcctctggagagtgcagtggttagacatagtgacgcacctgggctcccgaatggaagggaactgacaccggcatctccaacttgtacaaattctgtgtcaaagaatgaaacacatgctgaagtgcttgagcagcagaacgaactttgcccatatgagagtaaattcgattcttctcttctttcaagtgatgatgaaacaaaatgtaaaccgaattctgcttctgaagtcattggccctgtcagtttgcaagaaacaagtagcatagtaagtgtcccttcagaggcagtagataatgtggaaaatgtggtgtcatttaatgctaaagagcatgagaattttctggaaaccatccaagaacagcagaccactgaatctgcaggccaggatttaatttccattccaaaggccgtggaaccaatggaaattgactcggaagaaagtgaatctgatggaagtttcattgaagtgcaaagtgtgattagtgatgaggaacttcaagcagaattccctgaaacttccaaacctccctcagaacaaggcgaagaggaactggtaggaactagggagggagaagcccctgctgagtccgagagcctcctgagggacaactctgagagggacgacgtggatggtgagccacaggaagctgagaaagatgcggaagattcgctccatgaatggcaagatattaatttggaggagttggaaactctggagagcaacctcttagcacagcagaattcactgaaagctcaaaaacagcagcaagaacggatcgctgctactgtcaccggacagatgttcctggaaagccaggaactcctgcgcctgttcggcattccctacatccaggctcccatggaagcagaggcgcagtgcgccatcctggacctgactgatcagacttccggaaccatcactgatgacagtgatatctggctgtttggagcgcggcatgtctatagaaacttttttaataaaaacaagtttgtagaatattatcaatatgtggactttcacaatcaattgggattggaccggaataagttaataaatttggcttatttgcttggaagtgattataccgaaggaataccaactgtgggttgtgtaaccgccatggaaattctcaatgaattccctgggcatggcctggaacctctcctaaaattctcagaatggtggcatgaagctcaaaaaaatccaaagataagacctaatcctcatgacaccaaagtgaaaaaaaaattacggacattgcaactcacccctggctttcctaacccagctgttgccgaggcctacctcaaacccgtggtggatgactcgaagggatcctttctgtgggggaaacctgatctcgacaaaattagagaattttgtcagcggtatttcggctggaacagaacgaagacagatgaatctctgtttcctgtattaaagcaactcgatgcccagcagacacagctccgaattgattccttctttagattagcacaacaggagaaagaagatgctaaacgtattaagagccagagactaaacagagctgtgacatgtatgctaaggaaagagaaagaagcagcagccagcgaaatagaagcagtttctgttgccatggagaaagaatttgagctacttgataaggcaaaacgaaaaacccagaagagaggcataacaaataccttagaagagtcatcaagcctgaaaagaaagaggctttcagattctaaacgaaagaatacatgcggtggatttttgggggagacctgcctctcagaatcatctgatggatcttcaagtgaacatgctgaaagttcatctttaatgaatgtacaaaggagaacagctgcgaaagagccaaaaaccagtgcttcagattcgcagaactcagtgaaggaagctcccgtgaagaatggaggtgcgaccaccagcagctctagtgatagtgatgacgatggagggaaagagaagatggtcctcgtgaccgccagatctgtgtttgggaagaaaagaaggaaactaagacgtgcgaggggaagaaaaaggaaaacctaattaaaaaatatgtatcctctataattagttatgacagccatttgtaatgaatttgtcgcaaagacgtaataaaattaactggtggcacggtcaaaa

SEQ ID NO: 51 - protein, 1186 aa, Homo sapiens
MGVQGLWKLLECSGRQVSPEALEGKILAVDISIWLNQALKGVRDRHGNSIENPHLLTLFHRLCKLLFFRIRPIFVFDGDAPLLKKQTLVKRRQRKDLASSDSRKTTEKLLKTFLKRQAIKTAFRSKRDEALPSLTQVRRENDLYVLPPLQEEEKHSSEEEDEKEWQERMNQKQALQEEFFHNPQAIDIESEDFSSLPPEVKHEILTDMKEFTKRRRTLFEAMPEESDDFSQYQLKGLLKKNYLNQHIEHVQKEMNQQHSGHIRRQYEDEGGFLKEVESRRVVSEDTSHYILIKGIQAKTVAEVDSESLPSSSKMHGMSFDVKSSPCEKLKTEKEPDATPPSPRTLLAMQAALLGSSSEEELESENRRQARGRNAPAAVDEGSISPRTLSAIKRALDDDEDVKVCAGDDVQTGGPGAEEMRINSSTENSDEGLKVRDGKGIPFTATLASSSVNSAEEHVASTNEGREPTDSVPKEQMSLVHVGTEAFPISDESMIKDRKDRLPLESAVVRHSDAPGLPNGRELTPASPTCTNSVSKNETHAEVLEQQNELCPYESKFDSSLLSSDDETKCKPNSASEVIGPVSLQETSSIVSVPSEAVDNVENVVSFNAKEHENFLETIQEQQTTESAGQDLISIPKAVEPMEIDSEESESDGSFIEVQSVISDEELQAEFPETSKPPSEQGEEELVGTREGEAPAESESLLRDNSERDDVDGEPQEAEKDAEDSLHEWQDINLEELETLESNLLAQQNSLKAQKQQQERIAATVTGQMFLESQELLRLFGIPYIQAPMEAEAQCAILDLTDQTSGTITDDSDIWLFGARHVYRNFFNKNKFVEYYQYVDFHNQLGLDRNKLINLAYLLGSDYTEGIPTVGCVTAMEILNEFPGHGLEPLLKFSEWWHEAQKNPKIRPNPHDTKVKKKLRTLQLTPGFPNPAVAEAYLKPVVDDSKGSFLWGKPDLDKIREFCQRYFGWNRTKTDESLFPVLKQLDAQQTQLRIDSFFRLAQQEKEDAKRIKSQRLNRAVTCMLRKEKEAAASEIEAVSVAMEKEFELLDKAKRKTQKRGITNTLEESSSLKRKRLSDSKRKNTCGGFLGETCLSESSDGSSSEHAESSSLMNVQRRTAAKEPKTSASDSQNSVKEAPVKNGGATTSSSSDSDDDGGKEKMVLVTARSVFGKKRRKLRRARGRKRKT

SEQ ID NO: 52 - DNA, 5723 bp, Homo sapiens
  CDS (386)..(2350)
gcagccgccacattcaacaggcagcagcgcagcgggcgcgccgctggggagagcaagcggcccgcggcgtccgtccgtccttccgtccgcggccctgtcagctggagcgcggcgcaggctctgccccggcccggcggctctggccggccgtccagtccgtgcggcggaccccgaggagcctcgatgtggatggccccgcgaagttaagttctgggctcgcgcttccactccgccgcgccttcctcccagtttccgtccgctcgccgcaccggcttcgttcccccaaatctcggaccgtcccttcgcgccccctccccgtccgcccccagtgctgcgttctccccctcttggctctcctgcggctgggggaggggcgggggtcaccatggccgaggcgcctcaggtggtggagatcgacccggacttcgagccgctgccccggccgcgctcgtgcacctggccgctgcccaggccggagtttagccagtccaactcggccacctccagcccggcgccgtcgggcagcgcggctgccaaccccgacgccgcggcgggcctgccctcggcctcggctgccgctgtcagcgccgacttcatgagcaacctgagcttgctggaggagagcgaggacttcccgcaggcgcccggctccgtggcggcggcggtggcggcggcggccgccgcggccgccaccggggggctgtgcggggacttccagggcccggaggcgggctgcctgcacccagcgccaccgcagcccccgccgcccgggccgctgtcgcagcacccgccggtgccccccgccgccgctgggccgctcgcggggcagccgcgcaagagcagctcgtcccgccgcaacgcgtggggcaacctgtcctacgccgacctcatcaccaaggccatcgagagctcggcggagaagcggctcacgctgtcgcagatctacgagtggatggtcaagagcgtgccctacttcaaggataagggtgacagcaacagctcggcgggctggaagaattcaattcgtcataatctgtccctacacagcaagttcattcgtgtgcagaatgaaggaactggaaaaagttcttggtggatgctcaatccagagggtggcaagagcgggaaatctcctaggagaagagctgcatccatggacaacaacagtaaatttgctaagagccgaagccgagctgccaagaagaaagcatctctccagtctggccaggagggtgctggggacagccctggatcacagttttccaaatggcctgcaagccctggctctcacagcaatgatgactttgataactggagtacatttcgccctcgaactagctcaaatgctagtactattagtgggagactctcacccattatgaccgaacaggatgatcttggagaaggggatgtgcattctatggtgtacccgccatctgccgcaaagatggcctctactttacccagtctgtctgagataagcaatcccgaaaacatggaaaatcttttggataatctcaaccttctctcatcaccaacatcattaactgtttcgacccagtcctcacctggcaccatgatgcagcagacgccgtgctactcgtttgcgccaccaaacaccagtttgaattcacccagcccaaactaccaaaaatatacatatggccaatccagcatgagccctttgccccagatgcctatacaaacacttcaggacaataagtcgagttatggaggtatgagtcagtataactgtgcgcctggactcttgaaggagttgctgacttctgactctcctccccataatgacattatgacaccagttgatcctggggtagcccagcccaacagccgggttctgggccagaacgtcatgatgggccctaattcggtcatgtcaacctatggcagccaggcatctcataacaaaatgatgaatcccagctcccatacccaccctggacatgctcagcagacatctgcagttaacgggcgtcccctgccccacacggtaagcaccatgccccacacctcgggtatgaaccgcctgacccaagtgaagacacctgtacaagtgcctctgccccaccccatgcagatgagtgccctggggggctactcctccgtgagcagctgcaatggctatggcagaatgggccttctccaccaggagaagctcccaagtgacttggatggcatgttcattgagcgcttagactgtgacatggaatccatcattcggaatgacctcatggatggagatacattggattttaactttgacaatgtgttgcccaaccaaagcttcccacacagtgtcaagacaacgacacatagctgggtgtcaggctgagggttagtgagcaggttacacttaaaagtacttcagattgtctgacagcaggaactgagagaagcagtccaaagatgtctttcaccaactcccttttagttttcttggttaaaaaaaaaaacaaaaaaaaaaaccctcctttttttcctttcgtcagacttggcagcaaagacatttttcctgtacaggatgtttgcccaatgtgtgcaggttatgtgctgctgtagataaggactgtgccattggaaatttcattacaatgaagtgccaaactcactacaccatataattgcagaaaagattttcagatcctggtgtgctttcaagttttgtatataagcagtagatacagattgtatttgtgtgtgtttttggtttttctaaatatccaattggtccaaggaaagtttatactctttttgtaatactgtgatgggcctcatgtcttgataagttaaacttttgtttgtactacctgttttctgcggaactgacggatcacaaagaactgaatctccattctgcatctccattgaacagccttggacctgttcacgttgccacagaattcacatgagaaccaagtagcctgttatcaatctgctaaattaatggacttgttaaacttttggaaaaaaaaagattaaatgccagctttgtacaggtcttttctatttttttttgtttattttgttatttgcaaatttgtacaaacatttaaatggttctaatttccagataaatgatttttgatgttattgttgggacttaagaacatttttggaatagatattgaactgtaataatgttttcttaaaactagagtctactttgttacatagtcagcttgtaaattttgtggaaccacaggtatttggggcagcattcataattttcattttgtattctaactggattagtactaattttatacatgcttaactggtttgtacactttgggatgctacttagtgatgtttctgactaatcttaaatcattgtaattagtacttgcatattcaacgtttcaggccctggttgggcaggaaagtgatgtatagttatggacactttgcgtttcttatttaggataacttaatatgtttttatgtatgtattttaaagaaatttcatctgcttctactgaactatgcgtactgcatagcatcaagtcttctctagagacctctgtagtcctgggaggcctcataatgtttgtagatcagaaaagggagatctgcatctaaagcaatggtcctttgtcaaacgagggattttgatccacttcaccattttgagttgagctttagcaaaagtttcccctcataattctttgctcttgtttcagtccaggtggaggttggttttgtagttctgccttgaggaattatgtcaacactcatacttcatctcattctcccttctgccctgcagattagattacttagcacactgtggaagtttaagtggaaggagggaatttaaaaatgggacttgagtggtttgtagaatttgtgttcataagttcagatgggtagcaaatggaatagaacttacttaaaaattggggagatttatttgaaaaccagctgtaagttgtgcattgagattatgttaaaagccttggcttaagaatttgaaaatttctttagcctgtagcaacctaaactgtaattcctatcattatgttttattactttccaattacctgtaactgacagaccaaattaattggctttgtgtcctatttagtccatcagtattttcaagtcatgtggaaagcccaaagtcatcacaatgaagagaacaggtgcacagcactgttcctcttgtgttcttgagaaggatctaatttttctgtatatagcccacatcacacttgctttgtcttgtatgttaattgcatcttcattggcttggtatttcctaaatgtttaacaagaacacaagtgttcctgataagatttcctacagtaagccagctgtattgtaagcttcccaccgtgatgatcatttttttgaagattcattgaacagccaccactctatcatcctcattttggggcagtccaagacatagctggttttagaaacccaagttcctctaagcacagcctcccgggtatgtaactgaacttggtgccaaagtacttgtgtactaatttctattactacgtactgtcactttcctcccgtgccattactgcatcataatacaaggaacctcagagcccccatttgttcattaaagaggcaactacagccaaaatcactgttaaaatcttactacttcatggagtagctcttaggaaaatatatcttcctcctgagtctgggtaattatacctctcccaagcccccattgtgtgttgaaatcctgtcatgaatccttggtagctctctgagaacagtgaagtccagggaaaggcatctggtctgtctggaaagcaaacattatgtggcctctggtagtttttttcctgtaagaatactgactttctggagtaatgagtatatatcagttattgtacatgattgctttgtgaaatgtgcaaatgatatcacctatgcagccttgtttgatttattttctctggtttgtactgttattaaaagcatattgtattatagagctattcagatattttaaatataaagatgtattgtttccgtaatatagacgtatggaatatatttaggtaatagatgtattacttggaaagttctgctttgacaaactgacaaagtctaaatgagcacatgtatcccagtgagcagtaaatcaatggaacatcccaagaagaggataaggatgcttaaaatggaaatcattctccaacgatatacaaattggacttgttcaactgctggatatatgctaccaataaccccagccccaacttaaaattcttacattcaagctcctaagagttcttaatttataactaattttaaaagagaagtttcttttctggttttagtttgggaataatcattcattaaaaaaaatgtattgtggtttatgcgaacagaccaacctggcattacagttggcctctccttgaggtgggcacagcctggcagtgtggccaggggtggccatgtaagtcccatcaggacgtagtcatgcctcctgcatttcgctacccgagtttagtaacagtgcagattccacgttcttgttccgatactctgagaagtgcctgatgttgatgtacttacagacacaagaacaatctttgctataattgtataaagccataaatgtacataaattatgtttaaatggcttggtgtctttcttttctaattatgcagaataagctctttattaggaattttttgtgaagctattaaatacttgagttaa

SEQ ID NO: 53 - protein, 655 aa, Homo sapiens
MAEAPQVVEIDPDFEPLPRPRSCTWPLPRPEFSQSNSATSSPAPSGSAAANPDAAAGLPSASAAAVSADFMSNLSLLEESEDFPQAPGSVAAAVAAAAAAAATGGLCGDFQGPEAGCLHPAPPQPPPPGPLSQHPPVPPAAAGPLAGQPRKSSSSRRNAWGNLSYADLITKAIESSAEKRLTLSQIYEWMVKSVPYFKDKGDSNSSAGWKNSIRHNLSLHSKFIRVQNEGTGKSSWWMLNPEGGKSGKSPRRRAASMDNNSKFAKSRSRAAKKKASLQSGQEGAGDSPGSQFSKWPASPGSHSNDDFDNWSTFRPRTSSNASTISGRLSPIMTEQDDLGEGDVHSMVYPPSAAKMASTLPSLSEISNPENMENLLDNLNLLSSPTSLTVSTQSSPGTMMQQTPCYSFAPPNTSLNSPSPNYQKYTYGQSSMSPLPQMPIQTLQDNKSSYGGMSQYNCAPGLLKELLTSDSPPHNDIMTPVDPGVAQPNSRVLGQNVMMGPNSVMSTYGSQASHNKMMNPSSHTHPGHAQQTSAVNGRPLPHTVSTMPHTSGMNRLTQVKTPVQVPLPHPMQMSALGGYSSVSSCNGYGRMGLLHQEKLPSDLDGMFIERLDCDMESIIRNDLMDGDTLDFNFDNVLPNQSFPHSVKTTTHSWVSG

SEQ ID NO: 54 - DNA, 2319 bp, Homo sapiens
  CDS (49)..(1302)
agtgcgagatccgctgctgctgaggagaggagcgtcaacagcagcaccatggtagctcaacagaagaaccttgaaggctatgtgggatttgccaatctcccaaatcaagtatacagaaaatcggtgaagagaggttttgaattcacgcttatggtagtgggtgaatctggattgggaaagtcgacattaatcaactcattattcctcacagatttgtattctccagagtatccaggtccttctcatagaattaaaaagactgtacaggtggaacaatccaaagttttaatcaaagaaggtggtgttcagttgctgctcacaatagttgataccccaggatttggagatgcagtggataatagtaattgctggcagcctgttatcgactacattgatagtaaatttgaggactacctaaatgcagaatcacgagtgaacagacgtcagatgcctgataacagggtgcagtgttgtttatacttcattgctccttcaggacatggacttaaaccattggatattgagtttatgaagcgtttgcatgaaaaagtgaatatcatcccacttattgccaaagcagacacactcacaccagaggaatgccaacagtttaaaaaacagataatgaaagaaatccaagaacataaaattaaaatatacgaatttccagaaacagatgatgaagaagaaaataaacttgttaaaaagataaaggaccgtttacctcttgctgtggtaggtagtaatactatcattgaagttaatggcaaaagggtcagaggaaggcagtatccttggggtattgctgaagttgaaaatggtgaacattgtgattttacaatcctaagaaatatgaagataagaacacacatgcaggacttgaaagatgttactaataatgtccactatgagaactacagaagcagaaaacttgcagctgtgacttataatggagttgataacaacaagaataaagggcagctgactaagagccctctggcacaaatggaagaagaaagaagggagcatgtagctaaaatgaagaagatggagatggagatggagcaggtgtttgagatgaaggtcaaagaaaaagttcaaaaactgaaggactctgaagctgagctccagcggcgccatgagcaaatgaaaaagaatttggaagcacagcacaaagaattggaggaaaaacgtcgtcagttcgaggatgagaaagcaaactgggaagctcaacaacgtattttagaacaacagaactcttcaagaaccttggaaaagaacaagaagaaagggaagatcttttaaactctctattgaccaccagttaacgtattagttgccaatatgccagcttggacatcagtgtttgttggatccgtttgaccaatttgcaccagttttatccataatgatggatttaacagcatgacaaaaattatttttttttttgttcttgatggagattaagatgccttgaattgtctagggtgttctgtacttagaaagtaagagctctaagtacctttcctacattttctttttttattaaacagatatcttcagtttaatgcaagagaacattttactgttgtacaatcatgttctggtggtttgattgtttacaggatattccaaaataaaaggactctggaagattttcattgaggataaattgccataatatgatgcaaactgtgcttctctatgataattacaatacaaaggttccattcagtgcagcatatacaataatgtaatttagtctaacacagttgaccctattttttgacacttccattgtttaaaaatacacatggaaaaaaaaaaaccctatatgcttactgtgcacctagagcttttttataacaacgtctttttgtttgtttgttttggattctttaaatatatattattctcatttagtgccctctttagccagaatctcattactgcttcatttttgtaataacatttaatttagatattttccatcatattggcactgctaaaatagaatatagcatctttcatatggtaggaaccaacaaggaaactttcctttaactccctttttacactttatggtaagtagcagggggggaaatgcatttatagatcatttctaggcaaaattgtgaagctaatgaccaacctgtttctacctatatgcagtctctttattttactagaaatgggaatcatggcctcttgaagagaaaaaagtcaccattctgcatttagctgtattcatatattgctatttctgtattttttgtttgtattgtaaaaaattcacataataaacgatggttgtgatgt

SEQ ID NO: 55 - protein, 418 aa, Homo sapiens
MVAQQKNLEGYVGFANLPNQVYRKSVKRGFEFTLMVVGESGLGKSTLINSLFLTDLYSPEYPGPSHRIKKTVQVEQSKVLIKEGGVQLLLTIVDTPGFGDAVDNSNCWQPVIDYIDSKFEDYLNAESRVNRRQMPDNRVQCCLYFIAPSGHGLKPLDIEFMKRLHEKVNIIPLIAKADTLTPEECQQFKKQIMKEIQEHKIKIYEFPETDDEEENKLVKKIKDRLPLAVVGSNTIIEVNGKRVRGRQYPWGIAEVENGEHCDFTILRNMKIRTHMQDLKDVTNNVHYENYRSRKLAAVTYNGVDNNKNKGQLTKSPLAQMEEERREHVAKMKKMEMEMEQVFEMKVKEKVQKLKDSEAELQRRHEQMKKNLEAQHKELEEKRRQFEDEKANWEAQQRILEQQNSSRTLEKNKKKGKIF

SEQ ID NO: 56 - DNA, 6718 bp, Homo sapiens
  CDS (4987)..(5706)
ggatcctctgggcactctctagaggcgggatatatacagtctctgaattttaaaatagaaaacagtgggcagcggggaacggagtagagggaatcagaggtgccaaacattaaagatattttgggtaataaaaattaaaagttcatgtatcgcaagaacaaaaaaccaaacgccgcatgttctcataggtgggaactgaacaatgagaacacttcgacacaggaaggggaacatcacacaccagggcctgtcgtggggtggggggaggggggagggatagcattaggcgatatacctaatgtaaatgacgagttaatgggtgcagcacaccaacatggcacatgtgtacatatgtaacaaacctgcacgttgtgcacaggtaccctagaacttagagtataataaaaaaattaaaagtttatgatttaaacaaagattcttatttcctgggatcattttgtcacctcagtgcttgcttctgggttatggacacttgggggggtgggccggattaactgttttgtctctaaacacctgggtgcgctggcgctcactctcagctgcgagctgaagcccacgctgctctcaggcttcccgcaacaggcacctgcgacttcgctcaccaaaatcttccagtggccacagtgagcgggcaggactggtgccagcaagccccaagcatcccaggccctctggacgcaggtgactcttctggcctctttggaaagccattggagctcgagaggcatagccagctgcctcctttccgtccatccccaaccgcgttctctaagccacgttctgtgcgccttactcccagcactcagccattccccagccccagaggccttggagtagtgacctctgcccaccagagaggagggggccggagggtggggcggagcttgtggcaaggcaggtgggtgcaggcctctggggccccagactgccgcgtctggctctaccaggctgtgtctcgggccccgtgcctgcagctgcaaggcggggaaagacctatcgggaagatccacctcggcctgggcagaaggaaactttactgagagtcttctctgagtttggaattatgcggaaattgaacccaagatgaataacacgcagccacagccccagagaagctcgaagtctagtgggctgcaccgactgcgacagggacccaaaagaggctggggaacagggattgaaatggaagtgtgagagtgagagcatagaaggggtcctagcccagcccaggaaacagaaaagtctccccatagacagtgagaggcttgtactgatacctgaggtacgcgcaggagctgcgtgaaaggagaggcccagagccagaaaagaggaaggcgcatcctggacgctctgcgccctggagggagacgaaaggcccggagagaagcagattaggtcggtgcccttagaggcctcttccttcacttccgggaaacagcggcggttccctgacaaaatccctgttgctcgggggttcggacgccttgctaaggctggcacgcagcggaccttgagtagctgcgctgtgtactgaacgtgtgcacagcttctccaggcaaatgtgcaagcggaaagacctcatccaagcgttatctccagccctggaggagaatgaactggtagcctggggccaaacttcaggccgtggacaaagcaggaggagtatttaggcaacctctgtcctaatgcttgttctggttgtgaccgaagttgctgactctcctcaggggtcacgtctccaggacgtgctacccggtggtttagacccgtcagggaggcacagcgtgaagggacagcgcacgcagtagaggcacctgctggagacagcaccaggccagaccccaggatcacgggaactcctgctcccgccacagctctaaagagtgttgaataaaccggtggtcaccggtactgcgtaaggggtgtgcgtggctttgcagttcgcctaggagacaagctgatgcacggcctggaaggtgcagccctcatccctgcgttccctccccgcgcggagttcctgtctcaaggccaagacgcgcagcgctgatgctggccccttcctaggtcagtgcagctggaccaggcaatcggggtctccgaaacgtcggggggtcagctggcgccctgcccaccatcgaacgcccttcgtatcactccgctcctcattgcgaattggactgcgcattggctgcgacccaaggctgaacacaagaagcttggagaggagctcgggcgtttgaggagaaggaaatatgaggaattgcaggaaggcgctcgcctgcccgaactgcctccgggcaactggaaaggattgtcctggaaactgagaggagagaaaggacgtaggaccttgtgccagatccccttgctgagtaatttccaagagcttggtttgcattaacccagaactttgggtgtgcgtttggtgtcccctggggggttctagagtgagagattggcgggtcccctccgaacgctggatctcgctgcagatatcagtatttctctcattccttcccaaagccgtcgggatcgcccagtagaattagaattgggtgattcctgaatctcctatccctggctggctctgaatatagcgcaccgctggtcagacctgagtaggggttgccagcgacgctcggaaaccctttccagactgggctgaaaagtgcgtttgcttcctgagaccctaagctaaatgaaacttcctgcagagaaagcagggttacagggctggatggaggctctggagaaaggccagagctggggttgggaaggaatgtaaaggctgtgcacctgtttgccagccctcggaggtggagcccatggctaagcaaatcaagcgcaggatcagtctttccagcgtggtttatctgcatggcaggtgtcgattgccccaatagtctcatcaggtgttccacattgggctgcagagccatgaaatccctaggcgtgacgtctagtggaatgggggtgaaaatagggattttcaaatcctatacatcaagcatcactcccagagtcacttttgacaaatcacctagtttttctcaaccttagtttcctaatctgtaaaatggggatattgcccacctctctgaaaagtgcgccaagggtgagaagttccacgcgtctttctaattttaggaaggggaagcaaagtcttctcctcaaacttgatacactacatgctagagaaagatcctcccttccggcctcctcattccctgtcaccctcccccactcctagcccctcggagccaacggagccttgcgcgtttctggccggtcctcccaagagagaatggtgcaaaagccaataagcctggaacacacgcaggtcccgccgggcctgggacaatggtttccatttaataaatatttcccccaagggcatttcacatcgggcaggcaattattcaaaggaaacaggcgcgcaggttggctctgcgggttatttcgtcctctttacccgaagaatgctcatttgacgcaagaaacgagtctcgcagcctccctgggtgggaagaggcgcccagggacaaaccgaccctggttgcgatacaccgtgagactccgctctagggccgctgcagaaggggcaccgggaagagccccatacccagcctctaggctcttcttacggtatgaacatttgtggagtaaaagttggaggtttaaagacactaaataataataacgtaaatgggaactgcaatagaaatctcagccccatccctgccccaaaagtgaagaacaggtcgtagtgcttttaagggctcaccaactagggttcgaaatctctgcattgcctgacgcgaggccttccaggagcaggtcagacaacattgctcagccacccagggtcccagcgctacgcccgggcgccgcatcctggggcaggggtggatgcctagttgcaggggcttcccgggagaacactgccaaagcaccgccgagggtggggcgcgaaaagtttatttcgcttttaccctgagcctgctatatgttatttttctcttccaaggatatttgacaagagggcaaagtgctgtccttgcatttcgcggcaaagctgtcctatttatcaacacaagctctcgcctcgctccctttgctgtcccttccccggcctttgtatttcaagccctaattctctttcacaaccgggaaaggaaacaggagacgcggaagagttttatttgttgacagtgcccgagacaatgtggaaccgaagtccccagtctagagctagcctctctgctctagccctctctctgcctctgtccctcacacctctccccgcccccaccagtcgcgctctctgtttcttgcaccggcgtgttggcaggtgcgccccctcggcttctctgctgctgattggcgcccaggttggggagtcgccgccccgcgcttatgtcagagtgcgtgcagtcccggcccacctcgcctttgaacttcgccgcttttggctctcgttcaccagcctccccgcattctcagccaggtgcagcgctaggcgcggcagctccgggaaagccacgggaagggggagccacgactggaaacgcaagaggagagaagggaactagagaaggcaaaggtggagagggggagaaggaggagcttcttgccctggctaaaaaattacctggccacttaatcccggagactccgatacttgggtcccagcccctggttcctgaagccccccggccgatcgccctctcctcccccgccctttctgcccccactcgctcccccggggctgcctgggcgctgggactggcatgatcagctgaactttgtggggtcagcgcttctctctggcttcccctcagcggcgccaaggcgaggggagcgcagaaccccggctcaggacggacagacagacggccagccgcgcccaggctcgtctgcagaacccttgcactccctacccccacccacctagccgccgggaccatgtccaaaccttcagaccacatcaagcggcccatgaacgccttcatggtatggtcccggggccagcggcgcaagatggcccaggaaaaccccaagatgcacaactcggagatcagcaaacgcctaggtgccgaatggaagcttctgtccgaggcagagaagcggccatacatcgatgaagccaagcggctacgcgcccagcacatgaaggagcaccctgactacaagtaccgacctcggcgcaagcccaagaacctgctcaagaaggacaggtatgtcttccccttgccctacctgggcgacacggacccgctcaaggcggctggcctgcccgtgggggcctccgacggcctcctgagcgcgcccgagaaagcccgggccttcttgccgccggcctcggcgccctactccctgctggaccccgcgcagtttagctcgagcgccatccagaagatgggcgaagtgccccacaccttggctaccggcgctctgccctacgcgtccaccctgggctaccagaacggcgccttcggcagcctcagctgccccagccagcacacgcacacgcacccgtcccccaccaaccctggctacgtggtgccctgtaactgtaccgcctggtctgcctccaccctgcagccccccgtcgcctacatcctcttcccaggcatgaccaagactggcatagacccttattcgtcagcccacgctacggccatgtaacccccagcccggcccggacctgaggcgtggtctgaaagccgggtctgcaccctgtcctctgagcctagccccggcctgcagacgcctccggggtcagccctgccgctgtcccttacaccacccagacttttcctctctcttccagggggaagggtggggcgtcctcccggacccaaggcgcagacaggtaccggaaacttgcaaacgttatgtcagctacacagctgcccctatcccgactctcccaaaacaaatctccgactgtaccccctttggacaaaaaagtaggcagttttgctttatttatatccccttcactctcctcggataggctttggactctgaactcccagattctgatattatatctacaatatgcatatattttttccttttgtcccctgaagaaaagagttagctgtgtctctgtgttttgccatcagacacaactaggagccatttgctcttcatgtatgggggggaaaggcttcaaagttttaaattacagaaagggaaacatttctatttaaaaccatgctatgatagtgtttgcttctttaaagggaaaacaaaaaggacctacatggttatttactttgtgtaaagcagtgcttctagagatctaagtttacttttagacagaatgtcgggttatgaagtcaggaagtagaaggtgaacaaaaaattaaaagaacaaaaacaacctaaatggtcataaatgttttgacgatgtcttggaaatgtacctagaaggattttacctcgttgctctgttcatttgttgaacaaagacgttttgaataaagacaatctgtcattgtaaaaaagtaacctttgatgtgcctaaaatctgaagtcaggagccaggttggagggactggaaagtcgggtgcggggaggctgaaagtgcatagagcgactttaagcagtgatggctggtggctgccccccgttggcccagcttggtggtctgcgggttgggtgtagaagggcctagagcttcggatcc

SEQ ID NO: 57 - protein, 240 aa, Homo sapiens; identical to SEQ ID NO: 22

SEQ ID NO: 58 - DNA, 1769 bp, Homo sapiens
  CDS (105)..(1064)
gagagggcgaaggtaggctggcagatacgttcgtcagcttgctcctttctgcccgtggacgccgccgaagaagcatcgttaaagtctctcttcaccctgccgtcatgtctaagtcagagtctcctaaagagcccgaacagctgaggaagctcttcattggagggttgagctttgaaacaactgatgagagcctgaggagccattttgagcaatggggaacgctcacggactgtgtggtaatgagagatccaaacaccaagcgctctaggggctttgggtttgtcacatatgccactgtggaggaggtggatgcagctatgaatgcaaggccacacaaggtggatggaagagttgtggaaccaaagagagctgtctccagagaagattctcaaagaccaggtgcccacttaactgtgaaaaagatatttgttggtggcattaaagaagacactgaagaacatcacctaagagattattttgaacagtatggaaaaattgaagtgattgaaatcatgactgaccgaggcagtggcaagaaaaggggctttgcctttgtaacctttgacgaccatgactccgtggataagattgtcattcagaaataccatactgtgaatggccacaactgtgaagttagaaaagccctgtcaaagcaagagatggctagtgcttcatccagccaaagaggtcgaagtggttctggaaactttggtggtggtcgtggaggtggtttcggtgggaatgacaacttcggtcgtggaggaaacttcagtggtcgtggtggctttggtggcagccgtggtggtggtggatatggtggcagtggggatggctataatggatttggcaatgatggaagcaattttggaggtggtggaagctacaatgattttgggaattacaacaatcagtcttcaaattttggacccatgaagggaggaaattttggaggcagaagctctggcccctatggcggtggaggccaatactttgcaaaaccacgaaaccaaggtggctatggcggttccagcagcagcagtagctatggcagtggcagaagattttaattaggaaacaaagcttagcaggagaggagagccagagaagtgacagggaagctacaggttacaacagatttgtgaactcagccaagcacagtggtggcagggcctagctgctacaaagaagacatgttttagacaaatactcatgtgtatgggcaaaaaactcgaggactgtatttgtgactaattgtataacaggttattttagtttctgttctgtggaaagtgtaaagcattccaacaaagggttttaatgtagatttttttttttgcaccccatgctgttgattgctaaatgtaacagtctgatcgtgacgctgaataaatgtcttttttttaatgtgctgtgtaaagttagtctactcttaagccatcttggtaaatttccccaacagtgtgaagttagaattccttcagggtgatgccaggttctatttggaatttatatacaacctgcttgggtggagaagccattgtcttcggaaaccttggtgtagttgaactgatagttactgttgtgacctgaagttcaccattaaaagggattacccaagcaaaatcatggaatggttataaaagtgattgttggcacatcctatgcaatatatctaaattgaataatggtaccagataaaattatagatgggaatgaagcttgtgtatccattatcatgtgtaatcaataaacgatttaattctcttgaa

SEQ ID NO: 59 - protein, 320 aa, Homo sapiens
MSKSESPKEPEQLRKLFIGGLSFETTDESLRSHFEQWGTLTDCVVMRDPNTKRSRGFGFVTYATVEEVDAAMNARPHKVDGRVVEPKRAVSREDSQRPGAHLTVKKIFVGGIKEDTEEHHLRDYFEQYGKIEVIEIMTDRGSGKKRGFAFVTFDDHDSVDKIVIQKYHTVNGHNCEVRKALSKQEMASASSSQRGRSGSGNFGGGRGGGFGGNDNFGRGGNFSGRGGFGGSRGGGGYGGSGDGYNGFGNDGSNFGGGGSYNDFGNYNNQSSNFGPMKGGNFGGRSSGPYGGGGQYFAKPRNQGGYGGSSSSSSYGSGRRF

SEQ ID NO: 60 - DNA, 7764 bp, Homo sapiens
  CDS (708)..(5924)
ccctgggatggaggatctgtctctctctctctctctcctttttttttttttggtggagatgaaggggtgggtctatggtacatcacctgagttgtggggtaaatgtagagagtgtcaatcaaaggcagagctctcagagctgggaaggaggctctagatggcggctgtgccttagagagagcgcgctctgctccctgcctttgcctcactttacgcaactttccctaactttcgggcagcctcagggggcccccgtagccccctgcctttcctagggacttactggggtcgattcgaacctttttttgggagaaaagcagcttttaggagctttcttttcgtgccttgttggaaagaagcagccgtactgagagcccaggtcgttgttttttccagcttagaagccatggcgcacctccatttttgtgcgctctcctaatgaggttttttttctttcggacctgttttagtattaattattgctttatttttttgaccagttaacatatttgagggttattttatttatttttcgttttttaacggaggattttgcctttatttttaattatttgggatctgatatttttctactagtagataggactcttggtttggacatactacatggatcagtaaatacctgggcacaggacttcaaagcaaacacagattccccctcccccttaatatttaagaattaaaagatgatgagaaataaggacaaaagccaagaggaggacagttcgctacacagcaatgcatcgagtcactcagcctctgaagaagcttcgggttcagactcaggcagtcagtcggaaagtgagcagggaagtgatccaggaagtggacatggcagcgagtcgaacagcagctctgaatcttctgagagtcagtcggaatctgagagcgaatcagcaggttccaaatcccagccagtcctcccagaagccaaagagaagccagcctctaagaaggaacggatagctgatgtgaagaagatgtgggaagaatatcctgatgtttatggggtcaggcggtcaaaccgaagcagacaagaaccatcgcgatttaatattaaggaagaggcaagtagcgggtctgagagtgggagcccaaaaagaagaggccagaggcagctgaaaaaacaagaaaaatggaaacaggaaccctcagaagatgaacaggaacaaggcaccagtgcagagagtgagccagaacaaaaaaaagtaaaagccagaagacctgtccccagaagaacagtgcccaaacctcgtgttaaaaagcagccgaagactcagcgtggaaagagaaaaaagcaagattcttctgatgaggatgatgatgatgacgaagctcccaaaaggcagactcgtcgaagagcggctaaaaacgttagttacaaagaagatgatgactttgagactgactcagatgatctcattgaaatgactggagaaggagttgatgaacagcaagataatagtgaaactattgaaaaggtcttagattcaagactgggaaagaaaggagccactggagcatctactactgtatatgcgattgaagctaatggcgaccctagtggtgactttgacactgaaaaggatgaaggtgaaatccagtacctcatcaagtggaagggttggtcttacatccacagcacatgggagagtgaagaatccttacagcaacagaaagtgaagggcctaaaaaaactagagaacttcaagaaaaaagaggacgaaatcaaacaatggttagggaaagtttctcctgaagatgtagaatatttcaattgccaacaggagctggcttcagagttgaataaacagtatcagatagtagaaagagtaatagctgtgaagacaagtaaatctacattgggtcaaacagattttccagctcatagtcggaagccggcaccctcaaatgagcccgaatatctatgtaaatggatgggactcccctattcagagtgtagctgggaagatgaagccctcattggaaagaaattccagaattgcattgacagcttccacagtaggaacaactcaaaaaccatcccaacaagagaatgcaaggccctgaagcagagaccacgatttgtagctttaaagaaacaacctgcatatttaggaggggagaatctggaacttcgagattatcagctagaaggtctaaactggctagctcattcctggtgcaaaaataatagtgtaatccttgctgatgaaatgggcctaggaaagaccatccagaccatatcattcctctcctacctgttccaccaacaccagctgtatggcccctttcttatagtcgtccctttatccaccctcacctcatggcagagagagtttgaaatctgggcaccagagattaacgtagtggtttacataggtgacctgatgagcagaaatacgatacgggaatatgaatggattcattcccaaaccaaaagattgaagttcaacgcacttataacaacatatgagatcctcttgaaagataagactgtgctgggcagtattaactgggcctttctgggagtggatgaagcccatcggttgaagaatgatgactctttattgtataaaactctgattgatttcaagtccaaccataggctcctgattacggggacccctcttcagaattccctcaaagagctctggtccttgctgcactttattatgccggagaagtttgaattttgggaagattttgaagaagaccatgggaaggggagagagaatggctaccagagtcttcataaggtgctagagcctttccttctccggagagtcaaaaaagatgtggagaaatcccttcctgctaaagtggaacagattctcagggtggagatgtcagcccttcagaaacagtattacaagtggattctgaccaggaattacaaggctcttgccaaaggaacaagaggcagcacatctggttttcttaatattgtgatggaactgaaaaaatgttgcaaccactgctatctgattaaaccccctgaagaaaatgaaagggaaaatggacaggagattcttctgtccctcataaggagcagtgggaagttgattttattagacaaactgttgacaagacttcgagaaagggggaatcgagtgcttatcttctctcagatggtgagaatgttggatatcctggctgaatacctaactattaaacactatcctttccagcgtctggatggttccatcaagggagaaatccgaaaacaggcactggaccacttcaatgcagatgggtctgaggacttctgtttcctgctctcgacaagggctggtggcctgggaatcaatttggcttcagcggacacagtcgtcatctttgactctgactggaacccccagaatgacttgcaggcacaagcccgagcgcatagaattggtcagaagaagcaggtaaatatttaccgcttagttacaaaggggactgtggaggaggagatcatagaacgggccaaaaagaagatggtattagatcatctggtgattcagcgcatggacaccactggccggacgatcctggaaaacaactcaggaaggtccaactcaaatccttttaataaagaagagctgacagctattttgaaatttggagcagaggatctcttcaaagaactggaaggggaggaatcagaacctcaggaaatggatatagatgaaattttgcggttggctgaaacgagagagaatgaagtgtcaacaagtgcaacagatgaacttctatcacagtttaaggttgccaactttgcaacaatggaagatgaagaagagctagaagagcgtcctcacaaggactgggatgagatcattccagaggaacaaaggaaaaaagtagaggaggaagagcggcagaaggagctagaagaaatttatatgctgcctcgaattcggagttccactaaaaaggctcagacaaatgacagtgactctgacactgagtctaagaggcaggcccagagatcctctgcttctgagagtgaaacggaagactctgatgatgacaagaagccaaagcgcagagggcgtccgaggagtgtgcggaaggacctcgtggagggatttactgatgcagagatccgaaggttcatcaaggcttataagaagtttggtctccctcttgaacggctggagtgcttagcacgtgatgctgagctggtagataagtcggtggcagatctgaagcgcctgggtgaactgatccacaacagctgtgtgtcagcaatgcaggaatatgaagagcagctgaaagaaaatgccagcgagggaaaaggaccagggaaaaggagaggtccaacaatcaagatatccggagttcaggttaatgtgaaatccattatccaacatgaagaggagtttgagatgctgcataaatctatccctgtggaccctgaagaaaaaaaaaaatactgcttaacctgtcgtgtcaaagctgcacattttgatgtagagtggggggtggaagatgattctcgcctgttgctggggatttatgaacatggctatggaaactgggagttaattaaaacagacccagagcttaaattaactgacaaaattctgccggtggagacagataaaaagcctcaggggaagcagctacagacccgagcggattacttgttgaagctgctcagaaagggtctggagaagaagggggctgtgacaggtggggaggaggccaaattaaagaagcggaagcctcgggtaaagaaggaaaacaaagtgcccaggctgaaagaggagcatggaattgagctttcatctcctaggcattcagataatccatcagaagagggagaagtgaaagatgatggcttggaaaaaagtccaatgaaaaaaaaacagaagaagaaagagaacaaggagaacaaggagaaacaaatgagttctaggaaagacaaagaaggggacaaggaaagaaagaagtcaaaagataagaaagagaagcctaaaagtggtgatgccaaatcttcgagtaaatcaaagcgatctcagggtcctgtccatattacagcaggaagtgaacctgtccccattggagaggatgaggatgatgatctggaccaggagacattcagcatatgtaaggagaggatgaggcccgtgaaaaaggcactgaaacagctcgacaaacctgacaaggggctcaacgtgcaagaacagctggaacacacccggaactgcctgctgaaaatcggagaccggatagccgagtgccttaaagcctactcagatcaggagcacatcaaactctggaggaggaacctatggatttttgtttccaagtttacagaatttgatgctcgaaaactgcataagttatacaagatggctcataagaaaaggtctcaagaagaagaggagcaaaagaagaaagacgacgtgactgggggtaagaaaccatttcgtccagaggcctcaggctccagccgggactctctgatatctcagtcccatacctcacacaaccttcaccctcagaagcctcatttgcctgcctcccatggcccacagatgcatggacacccaagagataactacaatcaccccaacaagagacacttcagtaatgcagatcgaggagactggcagagggaaagaaagttcaactatggtggtggcaacaacaatccaccatggggaagcgacaggcaccatcagtatgagcagcactggtacaaggaccaccattatggggaccggcgacatatggatgcccaccgttccggaagctatcgacccaacaacatgtccagaaagaggccttatgaccagtacagcagtgaccgagaccaccggggacacagagattattatgacaggtatgcaaaaggctgtgagacaccaggtgccaacctttgccaggagctgtttctagggagaaagtgacgtatacatgaatgtatttatctatcaaattactgaagatctcatcatgcatgtgtcagccacagcgaatcccatgtcttggttataggttttatgttttgttttctgggtcatagggagcacatttcacctgtgcaggaaaagagttttctgccgtcttttgaggaaatctagtgaagaggtcgccataaaatattagagtcaacaaccaaaattattaagctctgtgcgaggctgtcagccacactaggtatcagggatcccgagatgggtaccagcccacagtccttacctgccacgagcccataattgaagagtcaaagtcttctgaagctgcaccctctttacttcagtacaatgccaccagtagtacgatgagccaaagctttacattgtgagagtagcaagtccagggagagctaaagaggttttatctgtatttcctaatttcaaatcttggataatttaacctcatagcagctttggttttccctgggctgatgatgtgcgtcatttgcactgtaccttgaatttacagtgggaaaatttcatataaacgtgtcaaagtcgtgctttgtttttggaagatctggtaacagcagcccgcattagcagagagctgtagctgagtagctgccacctcgttgggagactgcccctcgctcccacccttctctattgtctggacccagtgggcatcttgccctgcgttcttctagtaggtctgtatttctatttgatgtcactttccttttgcctgaaggactttttctgctggtgataaactctttcagtgtttgtatatatgcctgaaaaagtattttgccttcatttttgaaagtagtttttgctgagtgtatacatttttggctttacagtttctttcagtgctttaaagatgtacctctgctatttacttgcattgttttgtgatgaaaaatctgtcatccttatctttgttcctctttacataatgttccttttaaaaaaaatcactgattatgatgtgccttggtgtatttttccttggtttcttgtgcttggaaatttttgaacttcttggatctgtgggtttattgtttccataaaatttggaaatttttacaatcttcttcaaatattttttctgatcccccactctctcttcttctttggagattctcattacacctatattagcttgcttgaagttgtctcacagctcacttgtattctgttgacttttaaaaaattatgctttctgtttcactgtggatagtttctattgctacctcttcaagttcactaatactttccttttcaatgtcaagactgctgtgaggcccatccagtgtactttgcattttatacattgtagttctaaaagttcggaaagttgtttttgggtctttttatatatgttctgtgtctaaccttttaaaacctggaacacagatataacaatggttttgatgtccttgtctgcgaatcttatcacttgggtcagtttcagttgatacctcctcactgtgggtcttgctcccctggtgctttctgtgcctagtaatttttgtcagatgccagatgtaacatttaccttgttgggtgctggatatttctgtattcctgtaagtattctggagctttgttatgagttgcaggttatttggaagcagtttcctttttcaggtcttgctgttaagattcgttaggtagaaccagagcagtgctcagtcaagggctaatgattgcccacccccaaggtaaagagcctcattgcactctacccaattgcgttagtctgttttgcaggaatacctgaggctgggtaatttatagagaaaagagttttatttgg

SEQ ID NO: 61 - protein, 1739 aa, Homo sapiens
MMRNKDKSQEEDSSLHSNASSHSASEEASGSDSGSQSESEQGSDPGSGHGSESNSSSESSESQSESESESAGSKSQPVLPEAKEKPASKKERIADVKKMWEEYPDVYGVRRSNRSRQEPSRFNIKEEASSGSESGSPKRRGQRQLKKQEKWKQEPSEDEQEQGTSAESEPEQKKVKARRPVPRRTVPKPRVKKQPKTQRGKRKKQDSSDEDDDDDEAPKRQTRRRAAKNVSYKEDDDFETDSDDLIEMTGEGVDEQQDNSETIEKVLDSRLGKKGATGASTTVYAIEANGDPSGDFDTEKDEGEIQYLIKWKGWSYIHSTWESEESLQQQKVKGLKKLENFKKKEDEIKQWLGKVSPEDVEYFNCQQELASELNKQYQIVERVIAVKTSKSTLGQTDFPAHSRKPAPSNEPEYLCKWMGLPYSECSWEDEALIGKKFQNCIDSFHSRNNSKTIPTRECKALKQRPRFVALKKQPAYLGGENLELRDYQLEGLNWLAHSWCKNNSVILADEMGLGKTIQTISFLSYLFHQHQLYGPFLIVVPLSTLTSWQREFEIWAPEINVVVYIGDLMSRNTIREYEWIHSQTKRLKFNALITTYEILLKDKTVLGSINWAFLGVDEAHRLKNDDSLLYKTLIDFKSNHRLLITGTPLQNSLKELWSLLHFIMPEKFEFWEDFEEDHGKGRENGYQSLHKVLEPFLLRRVKKDVEKSLPAKVEQILRVEMSALQKQYYKWILTRNYKALAKGTRGSTSGFLNIVMELKKCCNHCYLIKPPEENERENGQEILLSLIRSSGKLILLDKLLTRLRERGNRVLIFSQMVRMLDILAEYLTIKHYPFQRLDGSIKGEIRKQALDHFNADGSEDFCFLLSTRAGGLGINLASADTVVIFDSDWNPQNDLQAQARAHRIGQKKQVNIYRLVTKGTVEEEIIERAKKKMVLDHLVIQRMDTTGRTILENNSGRSNSNPFNKEELTAILKFGAEDLFKELEGEESEPQEMDIDEILRLAETRENEVSTSATDELLSQFKVANFATMEDEEELEERPHKDWDEIIPEEQRKKVEEEERQKELEEIYMLPRIRSSTKKAQTNDSDSDTESKRQAQRSSASESETEDSDDDKKPKRRGRPRSVRKDLVEGFTDAEIRRFIKAYKKFGLPLERLECLARDAELVDKSVADLKRLGELIHNSCVSAMQEYEEQLKENASEGKGPGKRRGPTIKISGVQVNVKSIIQHEEEFEMLHKSIPVDPEEKKKYCLTCRVKAAHFDVEWGVEDDSRLLLGIYEHGYGNWELIKTDPELKLTDKILPVETDKKPQGKQLQTRADYLLKLLRKGLEKKGAVTGGEEAKLKKRKPRVKKENKVPRLKEEHGIELSSPRHSDNPSEEGEVKDDGLEKSPMKKKQKKKENKENKEKQMSSRKDKEGDKERKKSKDKKEKPKSGDAKSSSKSKRSQGPVHITAGSEPVPIGEDEDDDLDQETFSICKERMRPVKKALKQLDKPDKGLNVQEQLEHTRNCLLKIGDRIAECLKAYSDQEHIKLWRRNLWIFVSKFTEFDARKLHKLYKMAHKKRSQEEEEQKKKDDVTGGKKPFRPEASGSSRDSLISQSHTSHNLHPQKPHLPASHGPQMHGHPRDNYNHPNKRHFSNADRGDWQRERKFNYGGGNNNPPWGSDRHHQYEQHWYKDHHYGDRRHMDAHRSGSYRPNNMSRKRPYDQYSSDRDHRGHRDYYDRYAKGCETPGANLCQELFLGRK

SEQ ID NO: 62 - DNA, 3266 bp, Homo sapiens
  CDS (49)..(750)
gcggtgcgggccgggcgggtgcattcaggccaaggcggggccgccgggatgctcagggttccggagccgcggcccggggaggcgaaagcggagggggccgcgccgccgaccccgtccaagccgctcacgtccttcctcatccaggacatcctgcgggacggcgcgcagcggcaaggcggccgcacgagcagccagagacagcgcgacccggagccggagccagagccagagccagagggaggacgcagccgcgccggggcgcagaacgaccagctgagcaccgggccccgcgccgcgccggaggaggccgagacgctggcagagaccgagccagaaaggcacttggggtcttatctgttggactctgaaaacacttcaggcgcccttccaaggcttccccaaacccctaagcagccgcagaagcgctcccgagctgccttctcccacactcaggtgatcgagttggagaggaagttcagccatcagaagtacctgtcagcccctgaacgggcccacctggccaagaacctcaagctcacggagacccaagtgaagatatggttccagaacagacgctataagactaagcgaaagcagctctcctcggagctgggagacttggagaagcactcctctttgccggccctgaaagaggaggccttctcccgggcctccctggtctccgtgtataacagctatccttactacccatacctgtactgcgtgggcagctggagcccagctttttggtaatgccagctcaggtgacaaccattatgatcaaaaactgccttccccagggtgtctcatatgaaaagcacaaggggccaaggtcagggagcaagaggtgtgcacaccaaaactattggagaattgcgtggaaatcttcagattcttcactggtgagacaatgaaacaacagagacagtgaaagttttaatacctaagtcattcccccagtgcatactgtagcgtcaagtttttgcttctggctacctgtttgaaggggagagagggaaaatcaagtggtattttccagcactttgtatgattttggatgagctgtacacccaaggattctgttctgcaactccatcctcctgtgtcactgaatatcaactctgaaagagcaaacctaacaggagaaaggacaaccaggatgaggatgtcaccaactgaattaaacttaagtccagaagcctcctgttggccttggaatatggccaaggctctctctgtccctgtaaaagagaggggcaaatagtctccaaagagaacgccctcatgctcagcacatatttgcatggaagggggagatgggtgggaggagatgaaaatatcagcttttcttattcctttttattccttttaaaatggtatgccaacttaagtatttacagggtggcccaaatagaacaagatgcactcgctgtgattttaagacaagctgtataaacagaactccactgcaagagggagggccgggccaggagaatctccgcttgtccaagacaggggcctaaggagggtctccacactgctgctaggggctgttgcatttttttattagtagaaagtggaaaggcctcttctcaacttttttcccttgggctggagaatttagaatcagaagtttcctggagttttcaggctatcatatatactgtatcctgaaaggcaacataattcttccttccctccttttaaaattttgtgttcctttttgcagcaattactcactaaagggcttcattttagtccagatttttagtctggctgcacctaacttatgcctcgcttatttagcccgagatccggtctttttttttttttttttttccgtctccccaaagctttatctgtcttgactttttaaaaaagtttgggggcagattctgaattggctaaaagacatgcatttttaaaactagcaactcttatttctttcctttaaaaatacatagcattaaatcccaaatcctatttaaagacctgacagcttgagaagggtcactactgcatttataggaccttctggtggttctgctgttacgtttgaagtctgacaatccttgagaatctttgcatgcagaggaggtaagaggtattggattttcacagagggaagaacacagcgcagaatgaaggcgcaggcttactgagctgtccagtggagggctcatgggtgggacatggaaaagaaggcagcctaggccctggggagcccagtccactgagcaagcaagggactgagtgagccttttgcaggaaaaggctaagaaaaaggaaaaccattctaaaacacaacaagaaactgtccaaatgctttgggaactgtgtttattgcctataatggggtccccaaaatgggtaacctagacttcagagagaatgagcagagagcaaaggagaaatctgggctgtccttccattttcattctgttatctcaggtgagctggtagaggggagacattagaaaaaaatgaaacaacaaaacaattactaatgaggtacgctgaggcctgggagtctcttgagctccacgacttcaaaattaaaatgagccatgagtcaaaccactgcaatccagcctgggcaacgagcaagacccagtctctactgttggtggcaaaattgccaacataagttaatagaaagttggccaatttcaccccattttctgtggtttgggctccacattgcaatgttcaatgccacgtgctgctgacaccgaccggagtactagccagcacaaaaggcagggtagcctgaattgctttctgctctttacatttcttttaaaataagcatttagtgctcagtccctactgagtactctttctctcccctcctctgaatttaattctttcaacttgcaatttgcaagggttacacatttcactgtgatgtatattgtgttgcaaaaaaaaaaaagtgtctttgtttaaaattacttggtttgtgaatccatcttgctttccccattggaactagtcattaacccatctctgaactggtagaaaaacatctgaagagctagtctatcagcatctgacaggtgaattggatggttctcagaaccatttcacccagacagcctgtttctatcctgtttaataaattagtttgggttctctacatgcataacaaaccctgctccaatctgtcacataaaagtctgtgacttgaagtttagtcagcacccccaccaaactttatttttctatgtgttttttgcaacatatgagtgttttgaaaataaagt

SEQ ID NO: 63 - protein, 234 aa, Homo sapiens
MLRVPEPRPGEAKAEGAAPPTPSKPLTSFLIQDILRDGAQRQGGRTSSQRQRDPEPEPEPEPEGGRSRAGAQNDQLSTGPRAAPEEAETLAETEPERHLGSYLLDSENTSGALPRLPQTPKQPQKRSRAAFSHTQVIELERKFSHQKYLSAPERAHLAKNLKLTETQVKIWFQNRRYKTKRKQLSSELGDLEKHSSLPALKEEAFSRASLVSVYNSYPYYPYLYCVGSWSPAFW

SEQ ID NO: 64 - DNA, 2164 bp, Homo sapiens
  CDS (20)..(1174)
gtcggcggctcagttgtccatgaccctgaaggtccaggagtacccgaccctcaaggtgccctacgagacgctgaacaaacgctttcgcgccgctcagaagaacattgaccgggagaccagccacgtcaccatggtggtggccgagctggagaagacgttgagcggctgccccgccgtggactccgtggtcagcctgctggacggcgtggtggagaagctcagcgtcctcaagaggaaggcggtggaatccatccaggccgaggacgagagcgccaagctgtgcaagcgccggatcgagcacctcaaagagcatagcagcgaccagcccgcggcggccagcgtgtggaagaggaagcgcatggatcgcatgatggtggagcacctgctgcgttgcggctactacaacacggctgtcaagctggcgcgccagagcggcatcgaggacctagtgaatattgagatgttcctgacggccaaagaggtggaggagtccctggagaggcgtgagacggccacctgcctggcctggtgccatgacaacaagtcccggctccggaagatgaagagctgcctggagttcagcctcagaatccaggagttcattgaactcatccggcagaataagagactggacgctgtgagacatgcaagaaagcacttcagccaagcagaagggagccagctggacgaggtgcgccaggccatgggcatgctggccttcccgcccgacacgcacatctccccgtacaaggaccttctggaccctgcacggtggcggatgctgatccagcagttccggtacgacaactaccgactacaccagctgggaaacaattctgtgttcaccctcaccctgcaggccggcctctcagccatcaagacaccacagtgctacaaggaggacggcagctccaagagccctgactgccctgtgtgcagccgctccctgaacaagctggcgcagcccctgcccatggcccactgtgccaactcccgcctggtctgcaagatttctggcgacgtgatgaacgagaacaatccgcccatgatgctgcccaacggctacgtctacggctacaattctctgctttctatccgtcaagatgataaagtcgtgtgcccgagaaccaaagaagtcttccacttctcacaagccgagaaggtgtacatcatgtaggccccacgtcgtgaagcgcacgcctcggggacgggctgcagtgggcggggaggccacgccttcctcctgtcccacgctccagcctgccgcggcgtttctgtttcttgcgaccaaagatccgtgagcaacgataaatactcttaggaagagagaaaataaggtttcataagtttgtacttgaaaacatttggattggtaggattttgtaacacgtcaaccatttgatgcttctgaaaagtactttcaacttgcgaaggaaactcttctttaaagactgacctaaacaccgagggaaacttaagaacgtttaaaatataggagtccgtgatttccctgtgttttcagtttctttccttctgtgaacgatgagacttggagaacgggctggtccttcaccacttcctgttggccctggcctggccggggaaggtggcagcggcaccggactgacctgcagtgacccgcgatgccgcgccacgagggacacttatggcttcattcgagagctgctgccaaaacgcctggcgccgccaccgtcgggggctggcttcgaggacgcccgcctgcctcgcgggtcgtgtccgcgggactgtgttcgtacgtgcatagtttcgatatcacatcgcggggctgtgttcgtagctgcgtcgtttcgatatcacaccctctgtgtgccgccttacttcctgcttcgagaatgtataacgtggaaatccacgggaccaaatttctgcagaggccttgccggatggttccataactgtagagtctaattgctatccattacagaaattaatcgttcagttgaaagaagtactgatgacttttcaaaacaaatgaaccaccgtagctgacagagaaccgtatcgtagaggtttgtagttagtgcttatttttgcatgttgatgttgactagctaataaactgtaaatgtaaaccatgcgaataaaatggttttctatttctcaaaaaaaaaaaaaaaaaaaa

SEQ ID NO: 65 - protein, 385 aa, Homo sapiens
MTLKVQEYPTLKVPYETLNKRFRAAQKNIDRETSHVTMVVAELEKTLSGCPAVDSVVSLLDGVVEKLSVLKRKAVESIQAEDESAKLCKRRIEHLKEHSSDQPAAASVWKRKRMDRMMVEHLLRCGYYNTAVKLARQSGIEDLVNIEMFLTAKEVEESLERRETATCLAWCHDNKSRLRKMKSCLEFSLRIQEFIELIRQNKRLDAVRHARKHFSQAEGSQLDEVRQAMGMLAFPPDTHISPYKDLLDPARWRMLIQQFRYDNYRLHQLGNNSVFTLTLQAGLSAIKTPQCYKEDGSSKSPDCPVCSRSLNKLAQPLPMAHCANSRLVCKISGDVMNENNPPMMLPNGYVYGYNSLLSIRQDDKVVCPRTKEVFHFSQAEKVYIM

SEQ ID NO: 66 - DNA, 2015 bp, Homo sapiens
  CDS (882)..(1934)
gttttctactttgcccgcccacagatgtagttttctctgcgcgtgtgcgttttccctcctcccccgccctcagggtccacggccaccatggcgtattaggggcagcagtgcctgcggcagcattggcctttgcagcggcggcagcagcaccaggctctgcagcggcaacccccagcggcttaagccatggcgtgagtaccggggcgggtcgtccagctgtgctcctggggccggcgcgggttttggattggtggggtgcggcctggggccagggcggtgccgccaagggggaagcgatttaacgagcgcccgggacgcgtggtctttgcttgggtgtccccgagacgctcgcgtgcctgggatcgggaaagcgtagtcgggtgcccggactgcttccccaggagccctacagccctcggaccccgagccccgcaaggtcccaggggtcttggctgttgccccacgaaacgtgcaggaaccaagatggcggcggcagggcggcggcgcgggcgtgagtcaagggcgggcggtgggcggggcgcggccgctggccgtatttggacgtggggacggagcgctttcctcttggcggccggtggaagaatcccctggtctccgtgagcgtccattttgtggaacctgagttgcaagcagggaggggcaaatacaactgccctgttcccgattctctagatggccgatctagagaagtcccgcctcataagtggaaggatgaaattctcagaacagctaacctctaatgggagttggcttctgattctcattcaggcttctcacggcattcagcagcagcgttgctgtaaccgacaaagacaccttcgaattaagcacattcctcgattccagcaaagcaccgcaacatgaccgaaatgagcttcctgagcagcgaggtgttggtgggggacttgatgtcccccttcgacccgtcgggtttgggggctgaagaaagcctaggtctcttagatgattacctggaggtggccaagcacttcaaacctcatgggttctccagcgacaaggctaaggcgggctcctccgaatggctggctgtggatgggttggtcagtccctccaacaacagcaaggaggatgccttctccgggacagattggatgttggagaaaatggatttgaaggagttcgacttggatgccctgttgggtatagatgacctggaaaccatgccagatgaccttctgaccacgttggatgacacttgtgatctctttgcccccctagtccaggagactaataagcagcccccccagacggtgaacccaattggccatctcccagaaagtttaacaaaacccgaccaggttgcccccttcaccttcttacaacctcttcccctttccccaggggtcctgtcctccactccagatcattcctttagtttagagctgggcagtgaagtggatatcactgaaggagataggaagccagactacactgcttacgttgccatgatccctcagtgcataaaggaggaagacaccccttcagataatgatagtggcatctgtatgagcccagagtcctatctggggtctcctcagcacagcccctctaccaggggctctccaaataggagcctcccatctccaggtgttctctgtgggtctgcccgtcccaaaccttacgatcctcctggagagaagatggtagcagcaaaagtaaagggtgagaaactggataagaagctgaaaaaaatggagcaaaacaagacagcagccactaggtaccgccagaagaagagggcggagcaggaggctcttactggtgagtgcaaagagctggaaaagaagaacgaggctctaaaagagagggcggattccctggccaaggagatccagtacctgaaagatttgatagaagaggtccgcaaggcaagggggaagaaaagggtcccctagttgaggatagtcaggagcgtcaatgtgcttgtacatagagtgctgtagctgtgtgttccaataaattattttgtaggg

SEQ ID NO: 67 - protein, 351 aa, Homo sapiens
MTEMSFLSSEVLVGDLMSPFDPSGLGAEESLGLLDDYLEVAKHFKPHGFSSDKAKAGSSEWLAVDGLVSPSNNSKEDAFSGTDWMLEKMDLKEFDLDALLGIDDLETMPDDLLTTLDDTCDLFAPLVQETNKQPPQTVNPIGHLPESLTKPDQVAPFTFLQPLPLSPGVLSSTPDHSFSLELGSEVDITEGDRKPDYTAYVAMIPQCIKEEDTPSDNDSGICMSPESYLGSPQHSPSTRGSPNRSLPSPGVLCGSARPKPYDPPGEKMVAAKVKGEKLDKKLKKMEQNKTAATRYRQKKRAEQEALTGECKELEKKNEALKERADSLAKEIQYLKDLIEEVRKARGKKRVP

SEQ ID NO: 68 - DNA, 1215 bp, Homo sapiens; identical to SEQ ID NO: 3
  CDS (71)..(640)

SEQ ID NO: 69 - protein, 190 aa, Homo sapiens; identical to SEQ ID NO: 4

SEQ ID NO: 70 - DNA, 2653 bp, Homo sapiens
  CDS (262)..(2511)
ctcaaaaggggccggatttccttctcctggaggcagatgttgcctctctctctcgctcggattggttcagtgcactctagaaacactgctgtggtggagaaactggaccccaggtctggagcgaattccagcctgcagggctgataagcgaggcattagtgagattgagagagactttaccccgccgtggtggttggagggcgcgcagtagagcagcagcacaggcgcgggtcccgggaggccggctctgctcgcgccgagatgtggaatctccttcacgaaaccgactcggctgtggccaccgcgcgccgcccgcgctggctgtgcgctggggcgctggtgctggcgggtggcttctttctcctcggcttcctcttcgggtggtttataaaatcctccaatgaagctactaacattactccaaagcataatatgaaagcatttttggatgaattgaaagctgagaacatcaagaagttcttatataattttacacagataccacatttagcaggaacagaacaaaactttcagcttgcaaagcaaattcaatcccagtggaaagaatttggcctggattctgttgagctagcacattatgatgtcctgttgtcctacccaaataagactcatcccaactacatctcaataattaatgaagatggaaatgagattttcaacacatcattatttgaaccacctcctccaggatatgaaaatgtttcggatattgtaccacctttcagtgctttctctcctcaaggaatgccagagggcgatctagtgtatgttaactatgcacgaactgaagacttctttaaattggaacgggacatgaaaatcaattgctctgggaaaattgtaattgccagatatgggaaagttttcagaggaaataaggttaaaaatgcccagctggcaggggccaaaggagtcattctctactccgaccctgctgactactttgctcctggggtgaagtcctatccagatggttggaatcttcctggaggtggtgtccagcgtggaaatatcctaaatctgaatggtgcaggagaccctctcacaccaggttacccagcaaatgaatatgcttataggcgtggaattgcagaggctgttggtcttccaagtattcctgttcatccaattggatactatgatgcacagaagctcctagaaaaaatgggtggctcagcaccaccagatagcagctggagaggaagtctcaaagtgccctacaatgttggacctggctttactggaaacttttctacacaaaaagtcaagatgcacatccactctaccaatgaagtgacaagaatttacaatgtgataggtactctcagaggagcagtggaaccagacagatatgtcattctgggaggtcaccgggactcatgggtgtttggtggtattgaccctcagagtggagcagctgttgttcatgaaattgtgaggagctttggaacactgaaaaaggaagggtggagacctagaagaacaattttgtttgcaagctgggatgcagaagaatttggtcttcttggttctactgagtgggcagaggagaattcaagactccttcaagagcgtggcgtggcttatattaatgctgactcatctatagaaggaaactacactctgagagttgattgtacaccgctgatgtacagcttggtacacaacctaacaaaagagctgaaaagccctgatgaaggctttgaaggcaaatctctttatgaaagttggactaaaaaaagtccttccccagagttcagtggcatgcccaggataagcaaattgggatctggaaatgattttgaggtgttcttccaacgacttggaattgcttcaggcagagcacggtatactaaaaattgggaaacaaacaaattcagcggctatccactgtatcacagtgtctatgaaacatatgagttggtggaaaagttttatgatccaatgtttaaatatcacctcactgtggcccaggttcgaggagggatggtgtttgagctagccaattccatagtgctcccttttgattgtcgagattatgctgtagttttaagaaagtatgctgacaaaatctacagtatttctatgaaacatccacaggaaatgaagacatacagtgtatcatttgattcacttttttctgcagtaaagaattttacagaaattgcttccaagttcagtgagagactccaggactttgacaaaagcaacccaatagtattaagaatgatgaatgatcaactcatgtttctggaaagagcatttattgatccattagggttaccagacaggcctttttataggcatgtcatctatgctccaagcagccacaacaagtatgcaggggagtcattcccaggaatttatgatgctctgtttgatattgaaagcaaagtggacccttccaaggcctggggagaagtgaagagacagatttatgttgcagccttcacagtgcaggcagctgcagagactttgagtgaagtagcctaagaggattctttagagaatccgtattgaatttgtgtggtatgtcactcagaaagaatcgtaatgggtatattgataaattttaaaattggtatatttgaaataaagttgaatattatatataaaaaaaaaaaaaaaaaaa

SEQ ID NO: 71 - protein, 750 aa, Homo sapiens
MWNLLHETDSAVATARRPRWLCAGALVLAGGFFLLGFLFGWFIKSSNEATNITPKHNMKAFLDELKAENIKKFLYNFTQIPHLAGTEQNFQLAKQIQSQWKEFGLDSVELAHYDVLLSYPNKTHPNYISIINEDGNEIFNTSLFEPPPPGYENVSDIVPPFSAFSPQGMPEGDLVYVNYARTEDFFKLERDMKINCSGKIVIARYGKVFRGNKVKNAQLAGAKGVILYSDPADYFAPGVKSYPDGWNLPGGGVQRGNILNLNGAGDPLTPGYPANEYAYRRGIAEAVGLPSIPVHPIGYYDAQKLLEKMGGSAPPDSSWRGSLKVPYNVGPGFTGNFSTQKVKMHIHSTNEVTRIYNVIGTLRGAVEPDRYVILGGHRDSWVFGGIDPQSGAAVVHEIVRSFGTLKKEGWRPRRTILFASWDAEEFGLLGSTEWAEENSRLLQERGVAYINADSSIEGNYTLRVDCTPLMYSLVHNLTKELKSPDEGFEGKSLYESWTKKSPSPEFSGMPRISKLGSGNDFEVFFQRLGIASGRARYTKNWETNKFSGYPLYHSVYETYELVEKFYDPMFKYHLTVAQVRGGMVFELANSIVLPFDCRDYAVVLRKYADKIYSISMKHPQEMKTYSVSFDSLFSAVKNFTEIASKFSERLQDFDKSNPIVLRMMNDQLMFLERAFIDPLGLPDRPFYRHVIYAPSSHNKYAGESFPGIYDALFDIESKVDPSKAWGEVKRQIYVAAFTVQAAAETLSEVA

SEQ ID NO: 72 - DNA, 1528 bp, Homo sapiens
  CDS (179)..(1120)
cggcgagcgagcaccttcgacgcggtccggggaccccctcgtcgctgtcctcccgacgcggacccgcgtgccccaggcctcgcgctgcccggccggctcctcgtgtcccactcccggcgcacgccctcccgcgagtcccgggcccctcccgcgcccctcttctcggcgcgcgcgcagcatggcgcccccgcaggtcctcgcgttcgggcttctgcttgccgcggcgacggcgacttttgccgcagctcaggaagaatgtgtctgtgaaaactacaagctggccgtaaactgctttgtgaataataatcgtcaatgccagtgtacttcagttggtgcacaaaatactgtcatttgctcaaagctggctgccaaatgtttggtgatgaaggcagaaatgaatggctcaaaacttgggagaagagcaaaacctgaaggggccctccagaacaatgatgggctttatgatcctgactgcgatgagagcgggctctttaaggccaagcagtgcaacggcacctccacgtgctggtgtgtgaacactgctggggtcagaagaacagacaaggacactgaaataacctgctctgagcgagtgagaacctactggatcatcattgaactaaaacacaaagcaagagaaaaaccttatgatagtaaaagtttgcggactgcacttcagaaggagatcacaacgcgttatcaactggatccaaaatttatcacgagtattttgtatgagaataatgttatcactattgatctggttcaaaattcttctcaaaaaactcagaatgatgtggacatagctgatgtggcttattattttgaaaaagatgttaaaggtgaatccttgtttcattctaagaaaatggacctgacagtaaatggggaacaactggatctggatcctggtcaaactttaatttattatgttgatgaaaaagcacctgaattctcaatgcagggtctaaaagctggtgttattgctgttattgtggttgtggtgatagcagttgttgctggaattgttgtgctggttatttccagaaagaagagaatggcaaagtatgagaaggctgagataaaggagatgggtgagatgcatagggaactcaatgcataactatataatttgaagattatagaagaagggaaatagcaaatggacacaaattacaaatgtgtgtgcgtgggacgaagacatctttgaaggtcatgagtttgttagtttaacatcatatatttgtaatagtgaaacctgtactcaaaatataagcagcttgaaactggctttaccaatcttgaaatttgaccacaagtgtcttatatatgcagatctaatgtaaaatccagaacttggactccatcgttaaaattatttatgtgtaacattcaaatgtgtgcattaaatatgcttccacagtaaaatctgaaaaactgatttgtgattgaaagctgcctttctatttacttgagtcttgtacatacatacttttttatgagctatgaaataaaacattttaaactg

SEQ ID NO: 73 - protein, 314 aa, Homo sapiens
MAPPQVLAFGLLLAAATATFAAAQEECVCENYKLAVNCFVNNNRQCQCTSVGAQNTVICSKLAAKCLVMKAEMNGSKLGRRAKPEGALQNNDGLYDPDCDESGLFKAKQCNGTSTCWCVNTAGVRRTDKDTEITCSERVRTYWIIIELKHKAREKPYDSKSLRTALQKEITTRYQLDPKFITSILYENNVITIDLVQNSSQKTQNDVDIADVAYYFEKDVKGESLFHSKKMDLTVNGEQLDLDPGQTLIYYVDEKAPEFSMQGLKAGVIAVIVVVVIAVVAGIVVLVISRKKRMAKYEKAEIKEMGEMHRELNA

SEQ ID NO: 74 - DNA, 5541 bp, Homo sapiens
  CDS (27)..(2633)
gtccagagtggcagtaaaggaggaagatggcggggtgcagggggtctctgtgctgctgctgcaggtggtgctgctgctgcggtgagcgtgagacccgcacccccgaggagctgaccatccttggagaaacacaggaggaggaggatgagattcttccaaggaaagactatgagagtttggattatgatcgctgtatcaatgacccttacctggaagttttggagaccatggataataagaaaggtcgaagatatgaggcggtgaagtggatggtggtgtttgccattggagtctgcactggcctggtgggtctctttgtggacttttttgtgcgactcttcacccaactcaagttcggagtggtacagacatcggtggaggagtgcagccagaaaggctgcctcgctctgtctctccttgaactcctgggttttaacctcacctttgtcttcctggcaagcctccttgttctcattgagccggtggcagcaggttccgggatacccgaggtcaaatgctatctgaatggcgtaaaggtgccaggaatcgtccgtctccggaccctgctctgcaaggtccttggagtgctgttcagtgtggctggagggctcttcgtggggaaggaaggccccatgatccacagtggttcggtggtgggagctggcctccctcagtttcagagcatctccttacggaagatccagtttaacttcccctatttccgaagcgacagagacaagagagactttgtatcagcaggagcggctgctggagttgctgcagctttcggggcgccaatcgggggtaccttgttcagtctagaggagggttcgtccttctggaaccaagggctcacgtggaaagtgctcttttgttccatgtctgccaccttcaccctcaacttcttccgttctgggattcagtttggaagctggggttccttccagctccctggattgctgaactttggcgagtttaagtgctctgactctgataaaaaatgtcatctctggacagctatggatttgggtttcttcgtcgtgatgggggtcattgggggcctcctgggagccacattcaactgtctgaacaagaggcttgcaaagtaccgtatgcgaaacgtgcacccgaaacctaagctcgtcagagtcttagagagcctccttgtgtctctggtaaccaccgtggtggtgtttgtggcctcgatggtgttaggagaatgccgacagatgtcctcttcgagtcaaatcggtaatgactcattccagctccaggtcacagaagatgtgaattcaagtatcaagacatttttttgtcccaatgatacctacaatgacatggccacactcttcttcaacccgcaggagtctgccatcctccagctcttccaccaggatggtactttcagccccgtcactctggccttgttcttcgttctctatttcttgcttgcatgttggacttacggcatttctgttccaagtggcctttttgtgccttctctgctgtgtggagctgcttttggacgtttagttgccaatgtcctaaaaagctacattggattgggccacatctattcggggacctttgccctgattggtgcagcggctttcttgggcggggtggtccgcatgaccatcagcctcacggtcatcctgatcgagtccaccaatgagatcacctacgggctccccatcatggtcacactgatggtggccaaatggacaggggactttttcaataagggcatttatgatatccacgtgggcctgcgaggcgtgccgcttctggaatgggagacagaggtggaaatggacaagctgagagccagcgacatcatggagcccaacctgacctacgtctacccgcacacccgcatccagtctctggtgagcatcctgcgcaccacggtccaccatgccttcccggtggtcacagagaaccgcggtaacgagaaggagttcatgaagggcaaccagctcatcagcaacaacatcaagttcaagaaatccagcatcctcacccgggctggcgagcagcgcaaacggagccagtccatgaagtcctacccatccagcgagctacggaacatgtgtgatgagcacatcgcctctgaggagccagccgagaaggaggacctcctgcagcagatgctggaaaggagatacactccctaccccaacctataccctgaccagtccccaagtgaagactggaccatggaggagcggttccgccctctgaccttccacggcctgatccttcggtcgcagcttgtcaccctgcttgtccgaggagtttgttactctgaaagccagtcgagcgccagccagccgcgcctctcctatgccgagatggccgaggactacccgcggtaccccgacatccacgacctggacctgacgctgctcaacccgcgcatgatcgtggatgtcaccccatacatgaacccttcgcctttcaccgtctcgcccaacacccacgtctcccaagtcttcaacctgttcagaacgatgggcctgcgccacctgcccgtggtgaacgctgtgggagagatcgtggggatcatcacacggcacaacctcacctatgaatttctgcaggcccggctgaggcagcactaccagaccatctgacagcccagcccaccctctcctggtgctgcctggggaggcaaatcatgctcactccggcgggcacagctggctggggctgttccggggcatggaagattcccagttacccactcactcagaaagccgggagtcatcggacaccttgctggtcagaggccctgggggtggttttgaaccatcagagcttggacttttctgacttccccagcaaggatcttcccacttcctgctccctgtgttcccaccctccagtgttggcacaggcccacccctggctccaccagagccagaagcagaggtagaatcaggcgggccccgggctgcactccgagcagtgttcctggccatctttgctactttcctagagaacccggctgttgccttaaatgtgtgagagggacttggccaaggcaaaagctggggagatgccagtgacaacatacagttcatgactaggtttaggaattgggcactgagaaaattctcaatatttcagagagtccttcccttatttgggactcctaacacggtatcctcgctagtttgttttaagggaaacactctgctcctgggtgtgagcagaggctctggtcttgccctgtggtttgactctccttagaaccaccgcccaccagaaacataaaggattaaaatcacactaataacccctggatggtcaatctgataataggatcagatttacgtctaccctaattcttaacattgcagctttctctccatctgcagattattcccagtctcccagtaacacgtttctacccagatcctttttcatttccttaagttttgatctccgtcttcctgatgaagcaggcagagctcagaggatcttggcatcacccaccaaagttagctgaaagcagggcactcctggataaagcagcttcactcaactctggggaatgctaccattttttttccaaagtagaaaggaagcacttctgagccagtgaccactgaaaggtatgtgctatgataaagcagatggcctatttgaggaagagggtgtctgcccttcacaaacacctctctctcccctgcactagctgtcccaagcttacatacagaggcccttcaggagggcctcctgtgccgcagggagggtgcgtggggaagatgcttcctgccagcacgtgcctgaaggtttcacatgaagcatgggaagcgcaccctgtcgttcagtgacgtcattcttctccaggctggcccgccccctctgactaggcacccaaagtgagcatctgggcattgggcattcatgcttatcttcccccaccttctacatggtatcagtcccagcaggcatccctggggcagacgtgctttggctcaagatggccttcatttacgtttagttttttttaaaaccgtggaggttgcccacgggcctcggcacctggccctggcagcacagctctcaggcccagccctgggcgacctccttggccaagtctgcctttcaccctggggtgagcatcagtcctggctctgctggtccagatcttgcgctcagcacactctagggaataattccactccagagatggggctgcttcaaggtcttttctagctgattgtggcccctccattttccccattttcttatctccctgaccaaaattgctttgacttctaaatgtttctgcttcccagaatgcacctgacttatgaaatggggataatactcccaggaaatagcgcaggacatcacaaggaccaaaaaggcaattcttatttaaatgttactatttggccagctgctgctgtgttttatggcagtgttcagagcttgatcacgttatttcttccttttattaagaaggaagccaattgtccaagtcaggagaatggtgtgatcacctgtcacagacactttgtcccctctccccgccccttcctggagctggcagagctaacgccctgcaggaggaccccggcctctcgagggctggatcagcagccgcctgccctgaggctgccccggtgaatgttattggaattcatccctcgtgcacatcctgttgtgtttaagtcaccagatattttgttcccatcagtttagcccagagatagacagtagaatgcaaatacctccctcccctaaactgactggacggctgccaaggaggccccaaacccaggccccatgcaaaggcacgtggtttccttttctcctctctctgcatctgcgctttccagataagcccaaagacagcaacttctccactcatgacaaatcaactgtgaccctcgctccttccatttctgtccattagaaaccagccttttcagcatctcacccattagcagccccatcacccagtgatcagtcgcctcagtaaagcagatctgtggatggggagcctacgggtggtaagaagtggtgttttgtgtttcatctccagcttggtgttccatggcccctaggcgaggtgatcagggagtggggccaatgggcccccggccctggctttgggaccttgtgctgagggatgatttgctcctgaccttgattaacttaacagttcccagctggaagggacactttcaggacccagtccactgtatggcatttgtgatgcagaattatgcactgacatgaccctgggtgacaggaaagcctttcgagaggcccaaggtggcctcgccagccctgcagtattgatgtgcagtattgcaccacagctctgcggaccttggccattgccgcagtcgcagcttccttttttctgtttgcactgtttgtttgtatgatgttagctaattccactgtgtatataaattgtattttttttaatttgtaaaatgctatttttatttgaacctttggaacttgggagttctcattgtaaccctaacatgtgagaataaaatgtcttctgtc

SEQ ID NO: 75 - protein, 869 aa, Homo sapiens
MAGCRGSLCCCCRWCCCCGERETRTPEELTILGETQEEEDEILPRKDYESLDYDRCINDPYLEVLETMDNKKGRRYEAVKWMVVFAIGVCTGLVGLFVDFFVRLFTQLKFGVVQTSVEECSQKGCLALSLLELLGFNLTFVFLASLLVLIEPVAAGSGIPEVKCYLNGVKVPGIVRLRTLLCKVLGVLFSVAGGLFVGKEGPMIHSGSVVGAGLPQFQSISLRKIQFNFPYFRSDRDKRDFVSAGAAAGVAAAFGAPIGGTLFSLEEGSSFWNQGLTWKVLFCSMSATFTLNFFRSGIQFGSWGSFQLPGLLNFGEFKCSDSDKKCHLWTAMDLGFFVVMGVIGGLLGATFNCLNKRLAKYRMRNVHPKPKLVRVLESLLVSLVTTVVVFVASMVLGECRQMSSSSQIGNDSFQLQVTEDVNSSIKTFFCPNDTYNDMATLFFNPQESAILQLFHQDGTFSPVTLALFFVLYFLLACWTYGISVPSGLFVPSLLCGAAFGRLVANVLKSYIGLGHIYSGTFALIGAAAFLGGVVRMTISLTVILIESTNEITYGLPIMVTLMVAKWTGDFFNKGIYDIHVGLRGVPLLEWETEVEMDKLRASDIMEPNLTYVYPHTRIQSLVSILRTTVHHAFPVVTENRGNEKEFMKGNQLISNNIKFKKSSILTRAGEQRKRSQSMKSYPSSELRNMCDEHIASEEPAEKEDLLQQMLERRYTPYPNLYPDQSPSEDWTMEERFRPLTFHGLILRSQLVTLLVRGVCYSESQSSASQPRLSYAEMAEDYPRYPDIHDLDLTLLNPRMIVDVTPYMNPSPFTVSPNTHVSQVFNLFRTMGLRHLPVVNAVGEIVGIITRHNLTYEFLQARLRQHYQTI

SEQ ID NO: 76 - DNA, 1341 bp, Homo sapiens
  CDS (436)..(1068)
ggcacgaggctgctggctcacctccgagccacctctgctgcgcaccgcagcctcggacctacagcccaggatactttgggacttgccggcgctcagaaacgcgcccagacggcccctccaccttttgtttgcctagggtcgccgagagcgcccggagggaaccgcctggccttcggggaccaccaattttgtctggaaccaccctcccggcgtatcctactccctgtgccgcgaggccatcgcttcactggaggggtcgatttgtgtgtagtttggtgacaagatttgcattcacctggcccaaaccctttttgtctctttgggtgaccggaaaactccacctcaagttttcttttgtggggctgccccccaagtgtcgtttgttttactgtagggtctcccgcccggcgcccccagtgttttctgagggcggaaatggccaattcgggcctgcagttgctgggcttctccatggccctgctgggctgggtgggtctggtggcctgcaccgccatcccgcagtggcagatgagctcctatgcgggtgacaacatcatcacggcccaggccatgtacaaggggctgtggatggactgcgtcacgcagagcacggggatgatgagctgcaaaatgtacgactcggtgctcgccctgtccgcggccttgcaggccactcgagccctaatggtggtctccctggtgctgggcttcctggccatgtttgtggccacgatgggcatgaagtgcacgcgctgtgggggagacgacaaagtgaagaaggcccgtatagccatgggtggaggcataattttcatcgtggcaggtcttgccaccttggtagcttgctcctggtatggccatcagattgtcacagacttttataaccctttgatccctaccaacattaagtatgagtttggccctgccatctttattggctgggcagggtctgccctagtcatcctgggaggtgcactgctctcctgttcctgtcctgggaatgagagcaaggctgggtaccgtgcaccccgctcttaccctaagtccaactcttccaaggagtatgtgtgacctgggatctccttgccccagcctgacaggctatgggagtgtctagatgcctgaaagggcctggggctgagctcagcctgtgggcagggtgccggacaaaggcctcctggtcactctgtccctgcactccatgtatagtcctcttgggttgggggtgggggggtgccgttggtgggagagacaaaaagagggagagtgtgctttttgtacagtaataaaaaataagtattgggaaaaaaaaaaaaaaaaaaaaaaaaaaaaaaaaaaaaa

SEQ ID NO: 77 - protein, 211 aa, Homo sapiens
MANSGLQLLGFSMALLGWVGLVACTAIPQWQMSSYAGDNIITAQAMYKGLWMDCVTQSTGMMSCKMYDSVLALSAALQATRALMVVSLVLGFLAMFVATMGMKCTRCGGDDKVKKARIAMGGGIIFIVAGLATLVACSWYGHQIVTDFYNPLIPTNIKYEFGPAIFIGWAGSALVILGGALLSCSCPGNESKAGYRAPRSYPKSNSSKEYV

SEQ ID NO: 78 - DNA, 4975 bp, Homo sapiens
  CDS (199)..(4224)
ctctcacacacacacacccctcccctgccatccctccccggactccggctccggctccgattgcaatttgcaacctccgctgccgtcgccgcagcagccaccaattcgccagcggttcaggtggctcttgcctcgatgtcctagcctaggggcccccgggccggacttggctgggctcccttcaccctctgcggagtcatgagggcgaacgacgctctgcaggtgctgggcttgcttttcagcctggcccggggctccgaggtgggcaactctcaggcagtgtgtcctgggactctgaatggcctgagtgtgaccggcgatgctgagaaccaataccagacactgtacaagctctacgagaggtgtgaggtggtgatggggaaccttgagattgtgctcacgggacacaatgccgacctctccttcctgcagtggattcgagaagtgacaggctatgtcctcgtggccatgaatgaattctctactctaccattgcccaacctccgcgtggtgcgagggacccaggtctacgatgggaagtttgccatcttcgtcatgttgaactataacaccaactccagccacgctctgcgccagctccgcttgactcagctcaccgagattctgtcagggggtgtttatattgagaagaacgataagctttgtcacatggacacaattgactggagggacatcgtgagggaccgagatgctgagatagtggtgaaggacaatggcagaagctgtcccccctgtcatgaggtttgcaaggggcgatgctggggtcctggatcagaagactgccagacattgaccaagaccatctgtgctcctcagtgtaatggtcactgctttgggcccaaccccaaccagtgctgccatgatgagtgtgccgggggctgctcaggccctcaggacacagactgctttgcctgccggcacttcaatgacagtggagcctgtgtacctcgctgtccacagcctcttgtctacaacaagctaactttccagctggaacccaatccccacaccaagtatcagtatggaggagtttgtgtagccagctgtccccataactttgtggtggatcaaacatcctgtgtcagggcctgtcctcctgacaagatggaagtagataaaaatgggctcaagatgtgtgagccttgtgggggactatgtcccaaagcctgtgagggaacaggctctgggagccgcttccagactgtggactcgagcaacattgatggatttgtgaactgcaccaagatcctgggcaacctggactttctgatcaccggcctcaatggagacccctggcacaagatccctgccctggacccagagaagctcaatgtcttccggacagtacgggagatcacaggttacctgaacatccagtcctggccgccccacatgcacaacttcagtgttttttccaatttgacaaccattggaggcagaagcctctacaaccggggcttctcattgttgatcatgaagaacttgaatgtcacatctctgggcttccgatccctgaaggaaattagtgctgggcgtatctatataagtgccaataggcagctctgctaccaccactctttgaactggaccaaggtgcttcgggggcctacggaagagcgactagacatcaagcataatcggccgcgcagagactgcgtggcagagggcaaagtgtgtgacccactgtgctcctctgggggatgctggggcccaggccctggtcagtgcttgtcctgtcgaaattatagccgaggaggtgtctgtgtgacccactgcaactttctgaatggggagcctcgagaatttgcccatgaggccgaatgcttctcctgccacccggaatgccaacccatggggggcactgccacatgcaatggctcgggctctgatacttgtgctcaatgtgcccattttcgagatgggccccactgtgtgagcagctgcccccatggagtcctaggtgccaagggcccaatctacaagtacccagatgttcagaatgaatgtcggccctgccatgagaactgcacccaggggtgtaaaggaccagagcttcaagactgtttaggacaaacactggtgctgatcggcaaaacccatctgacaatggctttgacagtgatagcaggattggtagtgattttcatgatgctgggcggcacttttctctactggcgtgggcgccggattcagaataaaagggctatgaggcgatacttggaacggggtgagagcatagagcctctggaccccagtgagaaggctaacaaagtcttggccagaatcttcaaagagacagagctaaggaagcttaaagtgcttggctcgggtgtctttggaactgtgcacaaaggagtgtggatccctgagggtgaatcaatcaagattccagtctgcattaaagtcattgaggacaagagtggacggcagagttttcaagctgtgacagatcatatgctggccattggcagcctggaccatgcccacattgtaaggctgctgggactatgcccagggtcatctctgcagcttgtcactcaatatttgcctctgggttctctgctggatcatgtgagacaacaccggggggcactggggccacagctgctgctcaactggggagtacaaattgccaagggaatgtactaccttgaggaacatggtatggtgcatagaaacctggctgcccgaaacgtgctactcaagtcacccagtcaggttcaggtggcagattttggtgtggctgacctgctgcctcctgatgataagcagctgctatacagtgaggccaagactccaattaagtggatggcccttgagagtatccactttgggaaatacacacaccagagtgatgtctggagctatggtgtgacagtttgggagttgatgaccttcggggcagagccctatgcagggctacgattggctgaagtaccagacctgctagagaagggggagcggttggcacagccccagatctgcacaattgatgtctacatggtgatggtcaagtgttggatgattgatgagaacattcgcccaacctttaaagaactagccaatgagttcaccaggatggcccgagacccaccacggtatctggtcataaagagagagagtgggcctggaatagcccctgggccagagccccatggtctgacaaacaagaagctagaggaagtagagctggagccagaactagacctagacctagacttggaagcagaggaggacaacctggcaaccaccacactgggctccgccctcagcctaccagttggaacacttaatcggccacgtgggagccagagccttttaagtccatcatctggatacatgcccatgaaccagggtaatcttggggggtcttgccaggagtctgcagtttctgggagcagtgaacggtgcccccgtccagtctctctacacccaatgccacggggatgcctggcatcagagtcatcagaggggcatgtaacaggctctgaggctgagctccaggagaaagtgtcaatgtgtagaagccggagcaggagccggagcccacggccacgcggagatagcgcctaccattcccagcgccacagtctgctgactcctgttaccccactctccccacccgggttagaggaagaggatgtcaacggttatgtcatgccagatacacacctcaaaggtactccctcctcccgggaaggcaccctttcttcagtgggtctcagttctgtcctgggtactgaagaagaagatgaagatgaggagtatgaatacatgaaccggaggagaaggcacagtccacctcatccccctaggccaagttcccttgaggagctgggttatgagtacatggatgtggggtcagacctcagtgcctctctgggcagcacacagagttgcccactccaccctgtacccatcatgcccactgcaggcacaactccagatgaagactatgaatatatgaatcggcaacgagatggaggtggtcctgggggtgattatgcagccatgggggcctgcccagcatctgagcaagggtatgaagagatgagagcttttcaggggcctggacatcaggccccccatgtccattatgcccgcctaaaaactctacgtagcttagaggctacagactctgcctttgataaccctgattactggcatagcaggcttttccccaaggctaatgcccagagaacgtaactcctgctccctgtggcactcagggagcatttaatggcagctagtgcctttagagggtaccgtcttctccctattccctctctctcccaggtcccagccccttttccccagtcccagacaattccattcaatctttggaggcttttaaacattttgacacaaaattcttatggtatgtagccagctgtgcactttcttctctttcccaaccccaggaaaggttttccttattttgtgtgctttcccagtcccattcctcagcttcttcacaggcactcctggagatatgaaggattactctccatatcccttcctctcaggctcttgactacttggaactaggctcttatgtgtgcctttgtttcccatcagactgtcaagaagaggaaagggaggaaacctagcagaggaaagtgtaattttggtttatgactcttaaccccctagaaagacagaagcttaaaatctgtgaagaaagaggttaggagtagatattgattactatcataattcagcacttaactatgagccaggcatcatactaaacttcacctacattatctcacttagtcctttatcatccttaaaacaattctgtgacatacatattatctcattttacacaaagggaagtcgggcatggtggctcatgcctgtaatctcagcactttgggaggctgaggcagaaggattacctgaggcaaggagtttgagaccagcttagccaacatagtaagacccccatctc

SEQ ID NO: 79 - protein, 1342 aa, Homo sapiens
MRANDALQVLGLLFSLARGSEVGNSQAVCPGTLNGLSVTGDAENQYQTLYKLYERCEVVMGNLEIVLTGHNADLSFLQWIREVTGYVLVAMNEFSTLPLPNLRVVRGTQVYDGKFAIFVMLNYNTNSSHALRQLRLTQLTEILSGGVYIEKNDKLCHMDTIDWRDIVRDRDAEIVVKDNGRSCPPCHEVCKGRCWGPGSEDCQTLTKTICAPQCNGHCFGPNPNQCCHDECAGGCSGPQDTDCFACRHFNDSGACVPRCPQPLVYNKLTFQLEPNPHTKYQYGGVCVASCPHNFVVDQTSCVRACPPDKMEVDKNGLKMCEPCGGLCPKACEGTGSGSRFQTVDSSNIDGFVNCTKILGNLDFLITGLNGDPWHKIPALDPEKLNVFRTVREITGYLNIQSWPPHMHNFSVFSNLTTIGGRSLYNRGFSLLIMKNLNVTSLGFRSLKEISAGRIYISANRQLCYHHSLNWTKVLRGPTEERLDIKHNRPRRDCVAEGKVCDPLCSSGGCWGPGPGQCLSCRNYSRGGVCVTHCNFLNGEPREFAHEAECFSCHPECQPMGGTATCNGSGSDTCAQCAHFRDGPHCVSSCPHGVLGAKGPIYKYPDVQNECRPCHENCTQGCKGPELQDCLGQTLVLIGKTHLTMALTVIAGLVVIFMMLGGTFLYWRGRRIQNKRAMRRYLERGESIEPLDPSEKANKVLARIFKETELRKLKVLGSGVFGTVHKGVWIPEGESIKIPVCIKVIEDKSGRQSFQAVTDHMLAIGSLDHAHIVRLLGLCPGSSLQLVTQYLPLGSLLDHVRQHRGALGPQLLLNWGVQIAKGMYYLEEHGMVHRNLAARNVLLKSPSQVQVADFGVADLLPPDDKQLLYSEAKTPIKWMALESIHFGKYTHQSDVWSYGVTVWELMTFGAEPYAGLRLAEVPDLLEKGERLAQPQICTIDVYMVMVKCWMIDENIRPTFKELANEFTRMARDPPRYLVIKRESGPGIAPGPEPHGLTNKKLEEVELEPELDLDLDLEAEEDNLATTTLGSALSLPVGTLNRPRGSQSLLSPSSGYMPMNQGNLGGSCQESAVSGSSERCPRPVSLHPMPRGCLASESSEGHVTGSEAELQEKVSMCRSRSRSRSPRPRGDSAYHSQRHSLLTPVTPLSPPGLEEEDVNGYVMPDTHLKGTPSSREGTLSSVGLSSVLGTEEEDEDEEYEYMNRRRRHSPPHPPRPSSLEELGYEYMDVGSDLSASLGSTQSCPLHPVPIMPTAGTTPDEDYEYMNRQRDGGGPGGDYAAMGACPASEQGYEEMRAFQGPGHQAPHVHYARLKTLRSLEATDSAFDNPDYWHSRLFPKANAQRT

SEQ ID NO: 80 - DNA, 2064 bp, Homo sapiens
  CDS (28)..(1437)
ggcacgagggcagtggaggctgaggctatgatggcggccatggcgacggctcgagtgcggatggggccgcggtgcgcccaggcgctctggcgcatgccgtggctgccggtgtttttgtcgttggcggcggcggcggcggcggcagcggcggagcagcaggtcccgctggtgctgtggtcgagtgaccgggacttgtgggctcctgcggccgacactcatgaaggccacatcaccagcgacttgcagctctctacctacttagatcccgccctggagctgggtcccaggaatgtgctgctgttcctgcaggacaagctgagcattgaggatttcacagcatatggcggtgtgtttggaaacaagcaggacagcgccttttctaacctagagaatgccctggacctggccccctcctcactggtgcttcctgccgtcgactggtatgcagtcagcactctgaccacttacctgcaggagaagctcggggccagccccttgcatgtggacctggccaccctgcgggagctgaagctcaatgccagcctccctgctctgctgctcattcgcctgccctacacagccagctctggtctgatggcacccagggaagtcctcacaggcaacgatgaggtcatcgggcaggtcctgagcacactcaagtccgaagatgtcccatacacagcggccctcacagcggtccgcccttccagggtggcccgtgatgtagccgtggtggccggagggctaggtcgccagctgctacaaaaacagccagtatcacctgtgatccatcctcctgtgagttacaatgacaccgctccccggatcctgttctgggcccaaaacttctctgtggcgtacaaggaccagtgggaggacctgactcccctcacctttggggtgcaggaactcaacctgactggctccttctggaatgactcctttgccaggctctcactgacctatgaacgactctttggtaccacagtgacattcaagttcattctggccaaccgcctctacccagtgtctgcccggcactggtttaccatggagcgcctcgaagtccacagcaatggctccgtcgcctacttcaatgcttcccaggtcacagggcccagcatctactccttccactgcgagtatgtcagcagcctgagcaagaagggtagtctcctcgtggcccgcacgcagccctctccctggcagatgatgcttcaggacttccagatccaggctttcaacgtaatgggggagcagttctcctacgccagcgactgtgccagcttcttctcccccggcatctggatggggctgctcacctccctgttcatgctcttcatcttcacctatggcctgcacatgatcctcagcctcaagaccatggatcgctttgatgaccacaagggccccactatttctttgacccagattgtgtgaccctgtgccagtgggggggttgagggtgggacggtgtccgtgttgttgctttcccaccctgcagcgcactggactgaagagcttccctcttcctactgcagcatgaactgcaagctcccctcagcccatcttgctccctcttcagcccgctgaggagctttcttgggctgcccccatctctcccaacaaggtgtacatattctgcgtagatgctagaccaaccagcttcccagggttcgtcgctgtgaggcgtaagggacatgaattctagggtctcctttctccttatttattcttgtggctacatcatccctggctgtggatagtgcttttgtgtagcaaatgctccctccttaaggttatagggctccctgagtttgggagtgtggaagtactacttaactgtctgtcctgcttggctgtcgttatcgttttctggtgatgttgtgctaacaataagcagtacacgggtttatttctgtggcctgagaaggaagggacctccacgacaggtgggctgggtgcgatcgccggctgtttggcatgttcccaccgggagtgccgggcaggagcatggggtgcttggttgtttccttcctaataaaataaacgcgggtcgccatg

SEQ ID NO: 81 - protein, 470 aa, Homo sapiens
MMAAMATARVRMGPRCAQALWRMPWLPVFLSLAAAAAAAAAEQQVPLVLWSSDRDLWAPAADTHEGHITSDLQLSTYLDPALELGPRNVLLFLQDKLSIEDFTAYGGVFGNKQDSAFSNLENALDLAPSSLVLPAVDWYAVSTLTTYLQEKLGASPLHVDLATLRELKLNASLPALLLIRLPYTASSGLMAPREVLTGNDEVIGQVLSTLKSEDVPYTAALTAVRPSRVARDVAVVAGGLGRQLLQKQPVSPVIHPPVSYNDTAPRILFWAQNFSVAYKDQWEDLTPLTFGVQELNLTGSFWNDSFARLSLTYERLFGTTVTFKFILANRLYPVSARHWFTMERLEVHSNGSVAYFNASQVTGPSIYSFHCEYVSSLSKKGSLLVARTQPSPWQMMLQDFQIQAFNVMGEQFSYASDCASFFSPGIWMGLLTSLFMLFIFTYGLHMILSLKTMDRFDDHKGPTISLTQIV

SEQ ID NO: 82 - DNA, 60461 bp, Homo sapiens
  CDS (48893)..(49972)
atgtgctgctggattcggtttgccagtattttattgaggatttttgcatcaatgctcatcaaggatattggtctaaaattctcttttttggttgagtctctgcctggctttggtatcaggatgatgctggcctcataaaatgagttacggagggttccctctttttctattgattggagtagtttcagaaggaatggtaccagttcctccttgtacctctggttgaattcggctgtgaatccatctggtcctggactcttttttgttggtaagctattgattattgccacaatttcagagcctgttattcgtctattcagagagtcaatttcttcctggtttagtcttgggagggtgtatgtgtcgaggaatttatacatttcttccagattttctagtttatttgcatagaggtgtttgtagtattctctgatggtagtttgtatttctgtaggatcggtggtgatatcccctttatcattttttattgcgtctatttgattcttctctcttttcttctttattagtcttgctagcggtctatcaattttgttgatcctttcaaaaagcagctcctggattcattaattctttgaagggttttttgtgtctctatttccttcagttctgctctgattttagttatttcttgccttctgctagcttttgaatgtgtttgctcttgcttttctagttcttttaattgtgatggtagggtgtcaattttggatcttccctgctttctcttgtgggcattgagtgctataaatttccctctacacactgctttgaatgtgtcccagagattctgttatgttgtgtctttgttctcattggtttcaaagaacttcttaacccaggaatacagtgaactgataagacagagccctgtcgcagaggcacaatccagtggagaagggaatgctaaccctcctgggtcaccatactcaggactcaggaaccatgtcttcctcaggtttgcattctgagaaagttctcctgcagaaacctatgcttactacatgcttgattatatttaagtaaatttgccatttttaatttaatgaaaattcaaaacatgtaagtcatttcaacatatggtatgttgctaaataaaaacctttattttaaaaataggttttaattattaataatttatattactttcctgatccacaatgtggtctagcacagaggtgttagccattgcatgaaagataggaactgagcccctcttctctcttcagaaacttggaagcaagaaacaaaagtcagacattcatgtctttactcatctacacaaatttcatattttacctttttaaaatagctttacttatatatactctacatactatacagttcacccatttaaagaattaagtttatcctaaagctgcttccttacgtattttaaatttggcctaaaagtttctcagcatgtagtgaactgtaacctaactggatgctgaaaagactgaaacctactcttgtgccaatcacagagtttcagcatatctaaggtggtcagttgttcaaactgtgttcaaataaggcaaatgccaaattataaccaattctatttctgtacctcatttttgtcttctttacatcactttcctttttctgcccataaatctttttcaaccacgaggcagtgctggagtctctctgaacctattgcagttcagtggctgcccgatttgcacatcactctttgctcaattaagcactgttaaatttaatttgactaggtttgtcttttaacaaagatgtacagttcaatgttttttgtatgttttcaaacatacaaaagttgtgtaatgatcaccataatcaaatgtacaattttttatcatcgtccaattagcagacactaccattccctcctacccctccactctcagcctaggcaatcaaaattctctacagttatgtcactcctgaatatttcatataaatgaaatcatataatatgtcttcttctgtgactggcttctttcaattagcacaaggttttcaaggcacttccatgtgtaacatgtactttattcccttttattgccaaacaatatcctatggtatggagatatcacattttatctattcatcagttgatagatatttgacttatttctgctttggggctattatgaataatgctgctatgaattttcacgtctacatttttgtgtggacatatgttttcatttctaatgagtatatacctaggaatggaattgctgagccatatggtaactctatctatgcttagcattttgaagaattgccactgttttccaaaatggctgcactattttatattcccaccaacaatatatgagggatccaatttctccacattctggacaacacttgttactatctgactttttgattatagctatcctagtaggcctaaaatcataactaattgttcctttgagttgcattttcctgctggctaataatgttgagtttttttatgtgtttgtctaccttctttagagaaatgtatattaagatcctttgaccatttttaatggtgtttttattatctttgtgtgtgctttattatctttatatgttctatacacaagtccttatcaggtatataatttgcaaatatctttgcacattcttggctttttcttttcactttcttgatacccttggaagtatagatgctgttaatattgatgaaatcaaattaatttacctactttttcttgtatttcttatgcttttggagttgtatctaagatggctttgcataacccaaggtaacaaaggtttactcctacgttttctatttagttttataatttttctcttaagcttgggtctatgatccattttgacttaatttttacatgtggtattataaggagtccaacttcattcttctgcatgcagatatccaattattccagtaccatttgtaataaagattactcattctgcattttttcaacccttttcaaaatctagtggctcataaatgtaagggtttagtttgtggacacaattctgttccattgatctttctatctattgctatgccagtaccacattgtcttgtttattgtaattttgcagtaaattttgaaattggtaagtttgttctttttcagaattgtcttgactattctgggcccctcgcactgcacatgtttttaggataactccattcatttctgcaataaaagcttgctgggttttgatagagattttgtttaacctgtagatcatttgaagattaatgccattgtaacgatattaaatctttcaatccaagaacatggaatgtcattccatttatttaggtctaccttatttcaacaattctttttgtttgttttcagactacaagttttagatccttttgttaaatttatttcttagggttttttttgttttgttttgttttgttggttggttggtttgttttgagatggagtctcactctgtcacccaggctggagtgcagtggcacaatctcagctcacagcaacctctacctcctgggttcaagcgattcttctgcctcagcctcctcctcctgagtagctggaactacaggcatgcaccaccacgcctggctttttttttttttttttcttttgcatttttagtagagacagggtttcacgatgttggccagcctggtctcgaatccctgaccttgtgattcacccacctcggcctcccaaagtgctgagattacaggagtgagccactacaccaggtcatttcttagtatttttactcttttgatctatagtaagtaaaattgtttttatctttgaatttttaaatttttaacacagttcaaatcagtgtgtctgatttcatctccttctctaacaaaccagggtgccagaactgcttcagtttctctgccttctctttgtctatgatgactaatgtatgaaggtatctgctgcatcaaactttaaacttcacattatccttatttctcttgaccttgacagatctggcatcttttcacctggctgtaagcagaaagtccttgatctccttaactttttgaggcatggcagcatgtgaggcagggagaggacacagacccacacagcaagtggtgagaagccaacagtggaattgttttcttaattccatttgttgattgtttattgctagtgtatagaaatacaactgatttttgtatattgatcttgtattctaaaaacttgctcaacttgtttcttagttctaatagttaattaattgattccttagggctttttaatacaagatcatgtcatctacaaatagaaattgttttactttctttctaatctggatgccatttatctttttttcttgtccaattgccctcactagaacctttagtacaaagttaaatagaaatggggagactagacattttgtcttgttcctgatcttagacataaaaacgttgtcttccgttattatgtgtgatattagttaagtttttcataaataaacttcacagtttgaggaagttcctattcctagtttgttgagtgttagcatgaaaaagtgttgaattttgtccaatagtttttaaaaatttttttagacaatcatgtaggctttgtccattttttacttctttaaatttatttttattgatacacaatagatgtacactttttaggtacatgcaataatttaatgcccctcactataaattcggagctgcctcctcgccgatgattccagcgcctgacagccaggaccccaggcagcagcgagtgacaggactttttaggtacatgcaataatttaatgcattcatataaagatcaaatcagtgcaattggcatatccatcaccttaaatatttgtcttttcttcatgctagaaacattcaagttattttctcctagctactctgaaatatacaatagattactgtaaactacagtcaccctactcacctatctaacattaattgatttttggtaaactaatctaatcttgctttctggcatcaacctcacttgaccatggtgtatagtccctttcgtatgttattggattcaatttgcctacattttgttgagaatttttatctatactcttaagaaatattgatctgtagtctcgtgatgtctttatctggttttgttatcagggtgatactggcctcatagcatgagttgggagatcatccttactcttctattttttggaagagtttgtgaagaattgatattatttcttctttaaatacttattgggtttttaaaatacatttttaaaatgcaacttgggtagcatgtccaataggaacaaatgagtgtccacccttgaatttcataaccctggaattaatccagtaatctatgatccacaactgtattaccaaagttcgagttactcataggaaagagaaagaagttctctaattcgtccttaaaagttttccaagttcagaaaaaaaaaatgttgaagaacacgaatctccgcaggaaatgatactcctgtacccccagctcgctctccctcacgacccctcgctaggcggggttcgggaccaggtgaacgctgatctgatagttgacacgggacgactgtggcatcatccttgctgccgtcaatatcccgagagggaggaggttgggccgggagggtctcccggggcggggcggaggaggagggaatgcaaaacagagcctcgtccccggaacccaagaagcagcaacgcccctcactataaattcggagctgcctcctcgccaatgattccagcgcctgacagccaggaccccaggcagcagcgagtgacaggacgtctggaccggcgcgccgctagcagctctgccgggccgcggcggtgatcgatggggagcggctggagcggacccagcgagtgagggcgcacagccgggacgccgaggcggcgggcgggagacccgcaccagcgcagccggccctcggcgggacgtgacgcagcgcccggggcgcgggtgagtccgcgcggaccgccaggcatgcttgggggacttcaagggcggggtgctaagtttcatgtcacggtgtcctaactgctggctctatactgggaagctctcggggaccaaggaaagagcgaccgtagttctggtcagcgcctgcccctggagctggccacactttcccaaatcaggtgaggggcttctggaatgggagggaacaaggtaggtttgtttgccacgtgcctcgaaattctcaatccattttaaccaaactcttccgagtgcaaggaagaaatctacagaaataagatgcaattcaataaactttcttcctgaggcttttagttaactcttgtattttagccatcatctgagcgggaagccggtatgactctgcaaggcgttcgtttaaaagttgtgctacttttgaggtgaagttaagagtgtctccatccacgccctctgcttcccagtcaatgtccctgcactgctcacgtccctttagctctctccctgcaaaccatagcggtgggtcctagacacgggacatcgctccaaccttggccaaactctcccaccctcagggttcccagatgtcctttgaataatcaaactgaggaaggagaagcaagatgtctccacaccccaatccctacagccttagccaatgcatgtgtgtaactgagacagaattttagcaaaaggtctcctgcttccaggactaaacagagcctctggcaggccactgcccgacacccaactccatcctccaattttcttaaatgtccaggtaaacatctccatagtgccagcctgctatagtctcccgaagacctcagcaattcttccccaaagcgtctccttctgcaccgtttttttttttgggcaaccatttgtgacctggctattgagcccacctgggcctcttctctttgtttgctgatagcctcgttaagtattaaaaacctactcccccccttcaggagccctcttttaatgaaagtttgggtactgggatcagatttgggacttggctacatttatttcctgtgtcattctgagaagagaaagtaatagaggcaagaaatttggcaccctattgatctattttattactttgttgagcaacttgtgcttccggctgaagatgctgcatcccaacatgattctcttattattagttaccacctgagggttttggatctccaggtgtttatttcacatagcatatgctttaacccccttataagtcttctctaaggaagaaactgccatacttcccttgtcttctctggtgtttccctagctataaaggccccacctgcataacctgtcctcaggctgtgatgtattcccgggtgccctggtaccttctccttcctctccaccacccttcctgacagtgcaggggcaggaaagcatggggagaagggaaatggagactcccacttaacttgctgtgtgatagtaagagcattatttcacaactctgaacctcaagtctctgcccataaggttccctccagtgatataattccttaatttcttttgttttggttattgctttaaaataaaagtctaagcttaaggctaggttatagaaactgcccatcataattgctaggtctcaacatttgcttaagttttgtgattcttagtttcaagtctgttacccactctctctccccgccaccttttttccccctgacttcattgttctttgttcccatcctgaggccttgatttctggttctgctcttctttgaccttaaactgaatcaactcttccatcatccaactcagaataaaattggttttcttccaccggttccactgatgccaatggaagacttgtcttccttgcgatttgcaaaatgtctttcagtcacaggtgctgcggcaatgctgctgtcccacagcattctaagcttcagtctttctctctcttatcgtgggtcagtattcagaaaagggcagatttgtgggttgttcaggtttctcacttttctttttcttctttctagtttgggatcagagttgtgtgagtatttgtgtatataattttgttttggttttttgttcctgctgctacttacgactgctgttattatttcaattatgactaattaatactaatgactaattttcccctatgctagagggaaaataaggaagaaaagtttactctgctacttacccaaagcccaggtaaaatgcttagctgagaaggaatttaaaactcatagtttaaatgcatgatgcatgtctgctgtcattttatctgtgctgccacagtgtcctttcaagcagataactgagagttgctgtattttgctttcgaatttgttacagggacaaaaatagtgacccctcacatttaggtgttttggctgcttaatgcgagctcctgccctctagccgcatgcttattagtttacctagccctttttctggtcagtcatgactggagaatgccaaagagtctcccaagtaggctaccaaattaagaattgtgtttagaagtttgaagtcagtccaagtgttgtaaagattaaaacgttgttttgaagatatgctgtgtcaataaacaaatatggagccagagcaacacaatgtgaccaagtgtccaagcccagcttaggaacacttttctcccatgttatctagcaaactgacaaatcagctttccaacacgtgatgattggaaaatgctattagtttccttcaaaattctcctaatgtttctttttcaaaattgcctaagatcattggattatgtggtttgtgtttcttttcactgtagctgcttgttaaagcagtatactcaatctctgataagcaacagtaaatttgatcgatttgtatcctaaatttagctatcactttacattttgttttattcataatatgaactttagcttctaaaaatcaactttttaatagcttaatatataaagccatcttaaatcaaggaatatctatagggacttaaggtaatattcaactaaattggcaagtgactaccattatcctattaaagctctaaaatgcaatatttcaatcacagaaaaaaaatcttataatttaaagaactataaattgccagatgtttccctagttattacgttagtgacaaattagacaactggaaatagaaaacagagtatatgtttggaacagtcataaaaggactagtgactattgctgctagctgtggttgtattaacattaaaatatttgctatgggatttttcttcttatcaaagcagatgctcagatgaggaaaaactctcttgcatatgaaaatcaaaattgtcttccaaaatatttaagtaacaaaaaattcattatgtagtataaatgctgtatgattacattattcttatagttaatttagaagggtttgaatttgtttttgttttgtttgtgtttgtttcttcgataggtgcattctctaactgtcttaagtagaaacaaatgtctagaatctctcagtgattatcagtctccttcctattaccaagaatgtttttattgtgttgttaatctcacatgtaatttttttaacatttaaaagtttggaaaatgggtaaaaaatgagtgtgccttgtttcctattattacaatgtgccttcctatttcaagtcccaattctagatttccttaaaacttaaaatcatagaattaataatctttcagtttaagtcaacttttgtgtgatttcttgtccacttatacacacatagatgccttcatcttcaccaaataatgtagaaattttatttagttcaatggatttaagtactctgtatgcttaagtacaaaataagaatattgagaaatacacatatgattgtgtaccttttttttttttttttttgagacagagtcttgctctgttgcccaggctggcgtgcagtggcatgatctcggctcactgcaacctctgcctcccaggttcaaatgattttcctgcctcagcctccttagtagctgggattacaggtgcatgccgccacgcccagctaatttttgtatttttagtagagaagaggttcgccatgttggccaggctggtctcaaacttctgacctcaagtgatctccctgcctcggcctcccaaagtgctgggattacagacatgagccacctcacctggcctgattttgtacttttaaagagaatttgttgttgctaatttgctaagtttatttagatattttctgattctatattagtcaaagctcctcttatctactttggaaaatgaagaattatgtctataaaatatatcaacaacagctgcaggtacttacagaggaaatactgtggatctgagtgatattaggccctgaggatacaagccaaagtataaaaatggtctttgccgtagagagatagtagtcaagctaagcacatattttggcatgggtctctaatagcctaatgctagtagggtgggaagccatttaaaaatggcccctccttctgtcctgcctttcagaccagatggtgtgtctaaagtggtcacactgtttggttctggccacttctgtaataaccactgctcctttcccctcctcgtgagattataactcctttgacagtatggacggcacctaacgcatccttgttttcttttactaaatgttccacggagtcacttgcttgcctgtttgttgcttatttgtttgtttttggctaaaactacagaaaatgttaaatacattttcagacctttatattttaaaaaagaaatgttaagaaataaataatttttctaatctcatttagatacactgtcctattacacacaatgacaaatttgatgcttttgtcttgctaattgaagagctaagcatgaatacagtttttcagtctacagcagcaatgacaagggtaaagtggagaaaagagtaaggaaagaaaaaattaaaaagaataaaaggttgaaatatcaaatcggtggttcttaagatgacagaggcaggtgagacaagaatactggaatcacccagggggcatatgaaatctgtacatttcatccacaccttcttttctccccctgtcctcattccccctgttgagacacattgtattacaaattaggaggaaaccatctaaaattatctcacgtatcccagttcccatattagcatcatgagtatcacctgagagtttgttggaactgcagaatctcagaccctgtccagacccattgattgcataagaatctgcattttagcaaaatcctcaggtgattcaaatgcacattaagggaaaagaaacacagtgtaccgtacctgtggcttgtttagaataattatgaagaggtgttttcttggctcttaacgaacgtttttaataaagctaatatttattgagtacataaatgtgccaaacacaacgttcagtctttctttaaattttttttatttaatcctcacaacaaccctgtgagatagtttctgttttatccttattttatagattgggataccaagtaataatgagataagtagtttacccaaaagctgtaactgatacagtcgagatgtaaacataagaattctaatttcattgcctgttctcttagctgttacctacagtgtctgctctatactgggctacctactttttaaggccaactaattatttgaaaatttatttaaagttttaatttgagatcaaaatctgtttccctcataaatttttttttaaaaaagcaaacaagatctattccattttgatctaatgttttcctgtcaccttacctttaagtgcaataatgggaaattctagaaattccttctttaactgtttgaaaaaataccaaaactatgacagcctgtccaaatccactaaaatatatttttatatgcatgctttttgtatatcaattatacttcaataaagctttttaaaaaaatagtagatgacatacttttaaaaattaactttggagcccaggtatggtggctcagacctgtaatcccagcactttgggaggatcacttgaggccaggagtttgagaccagctgaggcaacaaactgagacccccatctctacaaaaaataaaaaattgccagagcatggtggcgcacaccatgtagtagttgggacctgtagtcccaactactcaggagactgagttgggaggattgcttgagtctgggaggtgaaggctgcagtgagccatgatcacaccactgcactccagcctgagcaacagagaaagaccctgtctcgaataataataataataataataacaacttttgatatctctattttttcccataaaaatccaaaattttctgtttactttttggtgctctcatgctataaagtaaattctcccttggattggacaagttattttctgttttctacatacacatagactgttcagcattccaactcaaattacatattactttttcagcttttaatataaatgcttatttactacaagcatggtttacaaaaatgtagtaaaatatagttactaaccagtcaatgctcaagccagtgactccccaaatgattcagtccctgagctgtttcacccagtgcaggtagattctctgacagccatcagttggatctgtccgaatatctcctgttttgacaggggcttattgatgttggtcaaaagacaggtgtgtatgggttccctgggatcatgtttgaggggaaacctgtgccaacaggactgagcagccactttttcaatggtattgagaaaatttgtaggagataaaatttcaccagctccttgaatctagaactgtagatattcaggtagcactgacattacaacatctaatttgtaagttatgggttagggcaaaatcaatccagggctgccatcatgacaagtagtggaagtttgaaagaaggagaaatacccaaaagatatcttacacatagcaggcagagtttcttagtactaataaaaaataaagtaccagtgatcaccctctatagcccctaagagtcccctggtttcactaagccccaatatttgtggctgtggctgaatgcaatctgcacaaggttttctttttaacagttggaaaaaatctcatagcatagcatttttttctttttaacagttggaaaaattctcgtagcatagcatttttttctagtaaatttcatatacttaacaactttatcagcacatatattttccttcacacttacaatttcatcaacacatatactttactttttgactcaaattcttcttgccatcaattcaaatgctcctgcccttagaatgagaattttccattaacccagctttaataatctaactctctttcccattcaaatgatgtcacttcatataaaacacattttatcatgatgtctcccagccctcagttacacagttaattgctgccactttatcatgaatgaaaaagatgtgattcttgggtaatgatttcttgagtatgtcctggtctattatctactgagttaccagagtggatttttgagagaacacacagttattcctattccttttaatttccattaacttaagccatatgatagaacattacagttgttatatattttgtataaatataaaatgtaatatataatttatatattttaaaatatttagtggcaagtaaagatagtagtaagtgaaaaaatcactgtataacatatgaatcgtaagtgtgatcccatgtatgtgtatacctggtagatgcttgtcaaggtgccattaaggtcttgggttattggcatcttaatgaaattcatttaattatgttaggattgatttgttagtaaaatcacttacatgttttttaaatgcatgcatatctgtggagccaataagaaaaattaggaacaatatacaacaaatcttaagagcttttgaggatgattttttttctttctttcttttgtatgtacctacaaaattttctataatggatctctattgattttatattttttactttctatttgtcttggaatttctattactttatttataattcactctagattttaggtactagacaactactattaactctctggagaatggtactataaatctgaccctttctgtcatttttttttcctgtggtacactagtgtctcacaaagagtccacagaattcacacggtcatgatattttatagaagaaatcattttatgggaactttcttttgttaatagatccttccaatgctaacattattctgtataacaatgctaaagttggtatgcctaaatgctaaacttggtatgctaaagttggtttaaaaattaacctatatacaatcttcttgaataactcttcaactttaaataaatttcttatttaaaaaatcctcctatatataattaaaaatactgatgaatttgactacataaaaataaatgcttatacagtaaaaagtaccataaacaaagttatcatctaaacaagaaacctgggaaagctatttgccagccattacatgtaaaatttaagtttccttaacataacatgagctctttaatgtgagaaacaataaacaacctaattgaaacatgagcaaaagccatggctgagaaaactcgtagaagaattactatggaaacaataagaaaatgaaaagaagttcaacctcattcataattaacgaaatgcaagtcaaaacaaagatataccttttacttatcagataaagaaaaaatgatttgataaaacccagattcttggtattataaattggtataaccttaacggaggacattttatgaatatctatcaaaaacttagcatatacaaacaatttggttcaacagtctgttagaatttattatatagatacattcatataagtacaaaagtgcatatatgtaaatattattattgggacatttttgtagcagccaaaaggaaaactgaaaaaaaagattaaggctcattaatagcagactggttaaataaactatgtgtgagtacaatgaatgaaatattgtacagccatcaaaatgaatgaggtagatttatatatgctgatgtaggaaatctgctagccatcataagtaaaataaatgaaacaaagaagaaaatactatgatgtacaaaaagaaaaaactatagatatacatatttatatgcatgtgtatgcattttttatgaatatacatatttatatgcatgtgtatgcaagtcctagaaggagacataggtaactattagtagtacctctgggaagtaaatgcagagaaaagtaatagagggtaaggatatgtttacttttattttacatccttctgtaacttgacatttatacgacgcgttagcattacttctgggaaaaagaaaaacagaaaaggtaatcttttaaaaaggtattttttaaattatggtacaataaaatgtgcataagctttatactaagtaatagaatcatttaagtttagctgtagattcacaagtaaaaatccaatctattttcatattcttacatttagtagccatgtctatagaaagaaatggctaggaatgagactgcactattttaccctaaaacgttctttttctctttgcctaatgtatatctacaagggcattggggaagatgttgaccacaggcaggaagatgatgagatcctgtgcccaccacttaatgcagtctagctctatataaggaaaaatatgttcttgatgtgaaccagatggtttcactcccttcaaaaacactcttaagatgcagtgtggaagcttactctgtaaattaaaaaataaaaacctgactatattcagtggaatgcgttaatcatttttttctttttaggtttgatatttgacaaattgatctaaaatggctgggtttttatctgaataactcactgatgccatcccagaaagtcggcaccaggtaaatgccttacatctacagcagtgggtctgtcagcagttttctttaatgtgtcagcagtggggagagcgcaaaaacccacacacaccattatcttgtgaaagaagtagaggaagcagaaaataatgaaatcccagtgttaccacatcccctccaatatacagattaagagcgtttgtatttatatggttttaaacataaataacatcagaattactaagctatttccattcatgtactgataatgaatcatgtgagaaagtcctttggcaaggactccacatggccacaggtgattcctttgagcagtgttcttcctgtatagggcttaagaggaccagaagggaaatgattgtactctcttgtcagctacttcctgggcgatttgggttctttgataccccagtgctcactttcggaagtgttaagaccataaaccttaacagttgaccttctcaccttcagaaaacccaaatgtctcggagtttcattctcacaaacttccaccttcctccaatgatgagatataggaaaaaagacaatgtgaaattggagatggaggtgccctcttagcctctttacaggcatgagtcacatggcagggcattaaactctctcacaacctgttgtggagctcagcagggttagccaggactgttttgtctatctaactcttcttacatgggcctatgtgatatttttcataacaagagtccgggatttacctaactaataagatttccccacgcccctccttacaaaaactcagttcaaagaacaagccctcagcttctcctagtcccctccagggaaaatgaagagtagcttgtcctattctgaatatgttgtgctcccattttatcaaagtagaggatagatacgtaggtgctgggtgggtagataaatattagagggatgcttcttctttgctgtaacagattggcaagtaggaatcattttctggaaggtactccacagtggtggtgttagaaaactatttagaatgcctttaatcttggagataaaaatagtaacactttacagagttctgtcaatggatatctttagggatgttttgttttgggaggttttttttctgattttgtttttttcaggtatagcgaagcttgggaatctggactgtgcagattttctgcaaaaatccagctctggaaagagtgtattaagatgcatatcctaggatgacacaaagacagtatgctttattttacatcttaaaagtattgaacagaaggagttttgtccatgatatcccatcagcccactagcaggaaaagcaggacacttacccagggggttcctgctggaaatgattcttggaatcagccttccttctactctatttgggaagtctttggtttctaacattcacacatttgtagcaaagcttccaaaataactatgatgttttgcttaggaataacaaaacatggaagaaaacattctgtgaaattttaaactttttcaaacctttaagtttcagatgaataagcaaaacatacttaagtctaagaagctattttttgtttgtcaaagaactgatgttataccagttctaatattaattagcaactttgccctggttttcctgtaaaataatctccaaggccctatctcaatctgtgggcagtatactgaaatacaaaaagtgttcacaaaaggaccttctgaactttgcaatctccctttaaaacttttaccaacttaaaactacagaactctgatctcttattgatttaaactagtgatatgtaaacagcacttcagagcttgtttcacaggaccaaaaaatttatgctgaaatctactcatgacaaatgggaaaaccctgattagcacatttaaatgaataaataaagaaccgtattcaatggcttaaaatttatagacctgcatcatccattatggtagccatttactatatgtggctatttacatttaaatataaacgtattaaaattaaactaaaaattcagcccctctgttgcattacccccatctcaagtgctcagtagacacatgtggttagtggacaacacagatttagaacatttctatcataggaagtactactggacagtactgctgtcaacacacttattaataatgcagcagactttcttggccacttggtaagaaagttttctgctcttttaaacttatttgggaagtttttaatacttttgaaattatgatttcctcagtgttagattatctgatatacagctctcacagaccattttttgtttttcctgtttgtttgcatattaaaatatataggattcaatgtttcacgtgcttttctaaagttgcagttcttgatttcttaaaattgtgaaaagaagtacccacagttatattaagaactaaaatatatggctgttggcttggttaccaacattgctgacagctccaagtaagcaaaagtaaaaaagatgtaggatcatttttaaaggccaatattttcttccttactcattaccttctgtaaaattctgtaagattttctttagttttccaataatgataaacatttcaccattgcatagacataattaattgattttttaagcagttggagagccaaacaaaataaggggtagaatacttcttattttattttttaataaaaatgtacatattagaagcctttatttttatttaaattgtatgtcactgataaggtttggatatttgcccctccaaatctcatgttgaaatgtgatcccctgtgttggaggtggggcctggtgggaggtgtttggatcctgcaggcggatctctcatgaatggcttggtgccctccccatgttaatgaaagagttcttgctctggaactgtgacacctcccccctctctctcttgctcctgctctcgccatgtgacatgctggttccctatcaccttctgccatgattgtaagcatcctgtggcctcaccagaagcagaagctaacaccatgcttccttgtaagcctgcagaaccaggagtcagttaaagctcttttctttataaattacccagtttcaggtattcctttatagcaacacaagaatagaccaacacagtcacggataacagtagtttttcatttttcatcaatataatgatcctgctgtattcttaaagttcttaatcactatttgtcactaatacgataacattaataaaatttgagtctcagttactttccagtcacttatacctagcagttcaataacatttagttcctggactaatgatcatgtgttatataaggcaaaaaattaaaaacaaatttgtctttgagtcatcaaagcatcaagggtttgaaatagctatataactagctgtgaaaaagggatataaatatccagctgatatttcctttacacatttaatagtatcatttttcaatgaaagcataaataaaataagtttggaaccagtttggaatttttaaatattaatcgcagaatcttactaacagaaaacaaaagcaagataaatgctagtcatttgtgcctgagtttttttttcaataaacagaaatgaagcttgctttaggaaacatgtgtactccaaataacctactattcacacaattctcagtaacattctttcttttgcttaaataatacagccagatgtgcttagcacataactctatagaaaataataatttaaattagatttaaatagagatagatagacagacagacagatagacagatatttttgagacaaagtctcactttgtcctctaggctagagtgtagtggcatgatcatagctcactgcagccttaaactcctgggctcaagccatcctcctatctcatcctcccaagtatctaggactacaggcacatgcactatgcccagctaattatttttttaattttttgtagagatgtcgtcttgctacattgcctaggttgctcatgaacccccagcctcaagtgatcctcctgcctcagcctcccaaaatgctaagattacaggcatgaacccctgcacccaaccaatattaatatttttaacaattgaaagagctcaaagaaataggttttaaatttagaggccctgttttgctgacaggaaaggcttttagctggaatcaagagtgctgttgtcttttcccttcaattagtcattccttttaagacttttaagatttaaatgtatgagtcattttttaaatcccagaaagatctagtatatctcataaatgtaataatacagtgcagacctggtggaaaataattatttatctgaaactgggcctcagtgcctttcctgaatctaaacaaatgttcatctcacccagagaactgggacaacaggaacaaggtattgcaagtccaaaatccaatccaaagcagcgttcttcctccccacctctaggcaaggccaaaatacttctgcacacagtatagacaccagaaaaaaacagagccactgtagatgaaaccagtcagggggtaagagctgtcttttgatctagagcttgcacctttgctcctcagtaatactcccaggtcaaaaaggaaaaataagatgggcagttggctgcctcctggtccctccagcctggtcagtgaacagagtgggaagataaaacagctaagtatcttccttaacaatgcaaagcaagaaatccagtctgctttgggaaagtgaaagcaatgcaaattcagattattaatcataagagcatctcatgtgatatacaaaattattgtatagcagtaatgggtcagccgtattttattcaacactgaaccattaatgaatgctagctagtcttcctttcacttacagaatgtttatctatacatgactaaacaaagaaggagcgctggaaatgatcctgtgaaaaatactggctcacaatgtatcagctgagtttggggcaactgaggtagtaggaggcgccccctggacttctgctagaatttagatttaaatagatggatgaattagacaaaacatactctctgaaagagtgagaaatacaatattcaccaattaagtgaaggaaaaatctacactatgaataaaacaataaatgtggatacatttgaaaatttgaatttcaaaccccttaagataatgtgacaaatacaacaggcctaatttaacatcttaaagagatctgtgtgacctattttgcagttttattttcttaggacaatgcttcagtatctttaactttcatatttaatcattttttttcttttttggtttctatggtatcaccatccatcaatccatattggttggagggggggaatatatatatatatatatatgtatgtctcccaagagaaagtaattctgcaatcttcctcagcaattcagtctaacaattaagaacccttaagctaaatagaaaaattcatttcacaggcaagttttactcaatatgtataattagttttagttaactttattaatgaaatgtcgcaaatcaattaggtttgcaataatcagatgccgaggacccaagaggaaccattcctctcacaagaggggaaggtgatacacaatttagttgggaagcaaatgtaattagatttgatcaattgagtattcctgtcctgatgtggagtcagtcacatacccaagcctgagaatatatttgaaaagaggtagaaaaaaacccagtatgacttagaaaatgtccttgtggtcctattggccacaactggcagccaaaaagggctttgaagccacaggtagacaggttttgttcagacagggctatgttttagatttctctttcaaatctgaatggttttacgtagggcaatatataaactttcctatttgtcacagattctagcactctttaatgccttatactgggtgtttcacacagttatttaactgcccaaatcccaatggcacttcagtttgcaactatcatgacctagaagttagttattgaacagttatgaggtaacttaaagtttcttccctttgcctctagaataagaatatcaaagaaatgtcatgatgataggaatactactgaaagaggatattaaacactaggtattcctacttagggctacagtttgcagcagattctattgtgtttcagtcaataagtgtttttggacacctacatgccagacactattctcagcattgagcacaaagtcgtgagcaaggtagacaaaaatgcttggcctcataaaacttacattccagtgcataaagatgagaacaatcacgtaaaatttataatatgttggatggcatggaaaatggaaataaagtggaagggaggcttcaggttaaaaagagtgtttagggaaggtcttcttaggaagaaggaggaagctatgtggacatctgggagaagatcgctccaggcagagggtagagcaaatgcaaattccttgaggcagcaatgtgctggcatggtcaaggcacagcgagtatgccagggtcttcagaaaccacagagaagagtggataacaaaagtgaaatcaagtattgaagagtatgaactgacaggaactagagacatatttagaatggatgccggaacaggagaaatgggtgggattttaaaagctaaatgatttaaagacttaaaatgctctgaagtgtagtgaaatgttccccaaactgcagattttcccaggaaaccaggtgcataatttagtcatcgatgactggttctgtggcaatgactctagtaattagacccctgcattttatgtcagttccttctggatactcagctacattatttggtgcttttggtatacttcaaatatgcattgcctatcactgacctgtaatcctgtgtctctgggcctgaaaatataacttttcatgtagtagagaattagggctgtgcaacattgccactagattatttttaatgaaagctttgcccttttagataaatacagcaatgtattcaaacaagtcctagggataccactgagtgcaaaatgtcatgtactagttattccatttaaattattttatcttcaagtctaataagaaaattctaaataaaattatatatttgggattgtgtgtgtatcatccatccacatgtaagtaggaataaaattatttaatggaaaatttcaaataggctaactctaaaaatgtacagataatctgaatgagagaaaactatcctcactttgtgttatttttcaatggtagcattttctcataatccccatgcttttttcatgtcctgctattctttaagatttcctaatgaggattagggaataggcatatttaacaatctgtgttcgcaggttgaaaacaagaaaatgaagactaatagtttctctcctgttaatttgattttctacagctcctctcctaccagcttaggcagaggacttagttactatttccaatagatgggagccaaggaaaagacaagcatctgtgatgtcatgtctcccccaaacgggtagctgcctcaccagcctccattagagacatcccccagagtaagaaataagaaataatcatgagtagaatgagaaaaaaatgcagcttcctttatctgagaaaaacaatagtagctcaatgctgtggcctaaagggctttgaaaataatgcaatttctgataaaaataaatgccattattcttgcttattgtcactgttttagtcaaataagattttagcaagcatatttcaaattgttctaaatctaagtaaattggtaattaaatgctatcattagaaagtattttaatatcagaaaaattggaccataagaaagttagtttacccttgtattcatatatacatgtgctttgtgctaaaaattgttatcatttagtgagaacctgtgactatattaattaatttaatttaatcttcatatttctctgaccgttagagagtttgtgacttggataactttcaaacaactagtaccctgatggaaatccagaattttgttaacccagatcacagctgcatacttaaatgctatgcaacagtggcacttacccccaaaccgtatcctatggaaatgcctttttagcaaattaaactgaattgtgttcagagatccacaggtctaagcaacattagggaaggggtaaagtagtcctcagcaaggcccttttcagagcactccaccagtgcccttgtcctcctgggcagagctcctcagctatactccctttcctagtctaccctatcccacaacggaaccatacttctctcatggaagccctggtctcacagaactaaaaaggaggctcctagaaatggggttgtgttgagttgacagagatgtgtggctctttaaactgaaatataatccaaagagaacaagatctagtagaatttcaggtcctaagcctggttaaatttcaggtcctaaggctggttaatagtacaaatacagttatttatttataactagtgcaaatacagttatttatttataactatacaggaatttatttcccagtaccttctatattactaacatcccataaaaccagccatgtaaggaactagaacattttgagaatatgcaatacataaccttaaacaagaagttttcattcctaattaaaaaaaataagctagttcatcacaacttccttcaaatccttctgccactgatttctctcctgaaaagagatattatacggcattttagagaaaacaaacatctctaagtcacaaggagtggaataatcaaagttgcattttaagcaagattatggttttttctttgagttctctgaatttgaatagtttcttaaccttagttttttaactgctctgaaaatggtttctgtccctggtggactcttgtttcaatgcagttattttgtctggtagagtcacagagttaagctgtcattcagatcagaaaaaataaaagagagagatgaattaatctcaatggcacagtctccttattcaaaaaataaaaataaaaataaatctcaagtccaacaatgaatcatctttgagactctcccaagtgatctagttttaagggcaaaaactttggggaaactgttgggggagcaactggtgcccagtactgtttcacacacgtggtttttcttatctattgctcacacacttagacataactggaattattgcctttgtattgttgttgccattttataaaggaagacaaaaaagatcagacaaaataatagtgaacatctattaattggacacttactggtgtcaggcactgtgtcatgcactgtgtcaggcactgtattttcttatttaatccaacaaaaaaaataggctaaattatcttattggctcaattttctttacagaaactgagcctaaatttcccaaatggctaaccaatgccagggccagcaactcaaatttgggagtaattccgacacctaggttccaaccatttttctcccagaaataacccaccaaattcaccagagtctaagatcttactgttactgtttaattaactgctacaattgcagcattttaaaaaaatataaatgagcactgtgctagtatttaattatagctttatactgatactgggtacaagtataagctaacaccattttgaattatagtagaagagtcaggagctctgagaggaatgttcaggatagaataaagcagatattttaatgtctcatttcagtgaggaaaattgttaattcatatgccaccagccatcggcagaaatgtaacaggaaatgaagaaaaacttaattactttaaatacagtggtctgtagtacaaattattgtgccgtgaattagtttccttctgctgtagaattgatcattttgattatgtagccaagcagtgtaagacattactaaaattattcttgaatcctacctttgagatctatataaaacactaggcaatttgcctgcaaatacatagaaaacaatttttaaaaggattgggatgagttattttcccctctgttaaatattagcctttgaaatgaacccagctgatctgccaaataacacttggaaattgttgtgttttaataaagtgacagactgagagggaagccacactagacgtccttatgcttttagaggccttacagggcaggaacattatgcaataatgccttttaaaagaagtgagcttcctagtattacaccttgcctggcaacaaatgtagccacttactgaaatgcaggcgtaattagaatctatgaaaatctagcatcagaatcccaaacctctatgcaatactcagtaaattacagcttttatgtctgtaatattttcaaccattctacttaaatatgtgaatacatgagtgtggagttctttaggaggcctgctgcatatgctagggaaaggtttcatcatttctaatcaggatggctctgtaaatgggatgcctcatgttcaggtttctggaaggctcagagcctgggcttctactggcagagggtagacccaaatggactactctagtgaaaatctccaggtgaacatggaacgcagtgaaaacctggggtatccaacttgcagtataggccaccagcaagtgtcacctctattataactttaaccaggcaagctcagtctcatgcattagtttataaaattgcaacagagccttctaagactgaaaggacattagtttttaaacctatatattatgacctaattaaatgaaattttattttaaagccctcataaaagtagtaaaattggtgttttaaataaaccaaatgggaattcaaccactttaatttttcttttgttccaataggaaaataaatgctttaaaatttgaagttgaaacatgggttttaaatatattgagataaaaactattttgcataggcattttgaagaaaataaattttgttctcgtgatttgtgattggccattgatttccgtgtttaagattatgaaggtgtgctcagctgtctactagaaataacaggggagactcagtcttgtttcaaatggaagggctcctattcggttttctccttcatttcttaaagtgttgtgatttttttattccctggtgttatgtcttgagattttaaatcttaaaacatgcaattaggtattgaagttgaaagctggaagtctcagccagctagtaatggttttttaaaataggtaatacagacctctagtggttgaacagtttgaaagcctctgcaagaaaaggaaattgcgcagaaagtgcctgcattttaaggggaaaagttagttaaaattattcagatgataaaattcacatatttcataggaaaaaaaaagccagaatgggcttcaagggaaggtggcacacttcccatccttttagatgttcctcaattcctctaaataagcaaaaactctctggccaaagtcacagtaagaagtctggatctgtattatttttctctaaaagatcttgtgaacagagctgctagatctctgtattatatgaaacatatatttttgtacacagttttgcctcactggggctttgcttcctttgtactccagaggctccccatgaaaacaatctgcagccacctcaacttgcctgtgctgttctcaggttctgtccatggggagccacacttcagtgagctcagcgattggatggctttttagtctacatgagagggaaactccatgtgcctctagactagtgcttctcaaactctaatgaacacccaagtcacctggggaatctgcttgaaatgcagattctatctcggtctggggtggggcctgaggctgtcttgttcgtaaactcccagttgatgctaacgctgcccatccagggccacccagagcagcaagccggttctatgacagctctctttattttttagttacatattttgtttttactcatttcttctttgtttgctcttttactttaataacttctgttaaatttttaatatttggatctgtaaaacatttaaagttctctttcacttcactatgtacaagtatctctgggaatctgttattgaagttttgagaagttgatctcacattttaaaaatagattcagtgtcatctctttatcttgaaaagttcatggtagttgtgagcatctctctaaccacttgaagctattgggttagaggtagctacaattaaatatctgattagccatattgggagagtgggtgaaaacaggttttgtgcatgtggtagatgtgtaggaagctaaggacccaaaaaacaaccacatcataaaatcaagcagaaacacacacacaccacacacacacacagaggctcaaagcataagtgtcaacagatcagaagaaaacatgggagaatgtattttttcataccaaatctattaaaattccatcatctaaataacttcctatcatagcatgttgtcgacctcatttttcaaatccataattttagaacttatgtcgtggggtagtctaaaagcctcttgcaaacttttaacatctagtttcaaatcaaaaataatatattaacaagctgtagcatagagggagtacataaattatcatcattgccctgcatgaatagtaattcacaggtttggctcacacacaacttagatgaaataattaactatgtacagtacttaacagtataaaagtaattaatctagctgcctcgtaccggtttggcctaaataaacatgcaataaaaaagccataggattttattatttttttactcacgttactactttagtgtgttggaattttaatatgtcagaagaaagatatctttgcattaaaaaatcattttcttttcaaatgttaatgtactgattataactaagtgaattccatatatttataattgtgggcagatgttctcaattaatagttttattcattctacttcacagtttagtgaaaaggattattttaaattaaggtgtaaataagaacaaatgagatttttattactacaaatcacacagaatttgttggtggtgctataatcctgtgtaggtatagctttggcaaaacatttcagataagcttgttttttgccccatgggttctgggacgaggtgagttgtctgtttgtcctataaggttcagaaaggtaaaagggcaaggtcattaattggctagagggcaacaaagaaggtagttatccctgtgtggtcaagaaaaaagtggctcaggttatcttgctcgggagagaaaatgttcattcagctccagtccttttggtaaaagcccactctcagtgtatgagtgttcctttgcctaatcatgtagactataacatgttttcccctatatgactccatcgattaatcattgcagtattatccccacttcataaatgggcaaagaggaggatgaagccgagtagttcttccaaaatcaagtagcatgtaagatgtaggagcaaaactcaaatccagagacttctgcttccagccaagatggaataacagggactagatttacctccccacctaaaacaattttaaaaactggacatacatatgaaacaatggttttcaagagagtggacatcagataacaaagggcagtgatccctggaggataggaaacaaatgacctgggattgtcccagcccactgcctggagggagtttgcaggcatgatacagggatggtacacccaggcagaactcgaggtcctctctgagttaaggacacagagctgggagtccagagaggccaaggaggctagagttcagagtaccagagagttgagagctgcacagagaacccagagatctgcaaatggtaccccttgtgcttcagtgcatgtgggcaaataatcacccaaacgtattagagagaacaagccccagaggtcatcaagagctagaaaatagttgctatttccaccagccacagtggaaagtctcataattcatggagcatcaggtagcatactcagtaggttcttgcctcaggaatgggaaaaatttagccctagactaattgctgctctggtaccacctaagaaaccgtaaaagtcagactcaaaagaattaaattatttgcaagtaactcaactgcttttcagaaaacaactggagaaattttgtaggaatacaaaagcatccaatatccaacaaagtaaaattcacaatgtttagcatccattataaaatcaccaggcatgcgaagaagctggaaagtacaacccataaaaagaaaaaaatgaatagaaacagacccagtcagtaatgacacagatgataggattattacactattacattaaatggttattatgactatttcatatgttcaaaatgcttgatggaagtttgaacatattaaatgaagacatgggagatataaaaaagactgaaattgaacttctagagatgaaaactacaatgtctgagatgaaaacttaaactgagacttcagatgctaagactacatttgtttcacatccccacaacattcttccctggacgctgagtttcctcccagcagctgaatacttcatgcttcatcctttcttaatgctgaactctcagaaaaagtccttcattctaagaagaggcgggagggtgccactctgtagcccctttctcatctcactctggtccctgctggcctggaacagattccactcccttcatgcactgatactccactctagactgagcctcttcatgaggtagccatcaagccatccgcagtcatcaacatggcaccttctgagtcagttacaagagtttgcatcatcagaccaccattttccgtctctgttttctgacttaccccaaaactctagttaaaactcatgaaatattatctcttcacatgaaatacaattaatatggaagtcagcatttttgcatctcccaacgcttcacatccaaggagctgtgtatgaaatcatgaactatgttcttccagccaaccaagcaattaaccaaagtatacatgtccatgttgtccttgtacagagtttgaaatatgctcatgagaattaaactatttttcagtaaatctgaaaaatcaacttgcttgtccaggaagttttattagggatagaatcccaaacaatgaatgtgctagccaagtgttactattaatcagaaatactccatattcatccaggattaatcctgtgtaactccctcagtcagtgtagcaatgtgttctcttcctgcactttttttatgtgtgtgtattcccaaatctgcagtgaatgtatttaggaaatacattagtatcaaaaggacaaatgtagccttaaaacataaatgtacagataatttcctatttgtagcaaagttcacttcagaaacacttgataagaactattcaaaaataaatattttcagtatttatttaaaatattttaaaatgtaaactcctcaccagtcatctagccagggccactgagtgtggctctatgaaatagcttcagtccctttcactactgatgaccttttgaacacaagataatatttgtcgagtaaatgtcaaaatagtataagaatacccaaatcatggattctatgctgtattcactcacatagagacttcactttggagcacttcagagcagcaacagctctaagagatgtaacagtatgctttccaggatagaagaacgaaaagggaaaaataagttgctagcaagaacaatgaggggtaggggtgaagttcaggctgccattctgaaagcttcctcagactgagtcaggcacatctcacgaagtgcagactatgcaagctggctgtgtgagatcaagggtagacagttgactcatcctgtcacatctctgtgttttaccgtaacctccaactattcagccatgaatcgctgcatgtggaatggaagggggaatgtctaacaaacagagacatacttcaagtcttcagtctagttaaaacattggaatgagggtctgcaacatctttctggggcttggagtctcgtctcagttctaaaatgagatggttggcctggatcctaagtttcaaattggcagcctttttaactaaatctaatctagaagagttctgttaggttccacagtgttgggttttaaaatatatatatatattagttgaaaacattttaaaataggatctttcacatgaaatttgaaattttaagtttatattttaaagttagctgttttcccccacctcattacaattggcacagttgactatagctgagaagtgaccccgtggcccccctccaagaaagggggagggccctccattcaccaccatgtccacttcacctatttctcccagcctatatatgtatttgaatatgtgaaccctggaatgcataatgtctagggaccataacaacaatagaatgctatgaatctctgacttacaaggactctcttatgaatctctgacttacaaggactctcttatgaatctctgacttacaaggaaaacaaaagactgtagagaatagtagttcaaccacattttaggttaaaatagactttacttggataacctgacaaccaaaacatctttgataatatagtaattgtgtatgtttaccagacaaagggtatacatgtatattcttgtatttctcttaagaagaaaatcaataaatttgacccatgaatttctttctatagcagacatttttgtgacttcctgactcacaggagatacagctaccctccaaacctaaatcaaaagtccgtaagttgcagaatgactttttatgtaaagagaacatactagtttctgataagatataaagaaaccatgtaatttatctagggaatgactctaagctgatcattgacttatttacacaactatagctactggaatagactgattccaaaaatatattttctctgaattagaatctttttcatatcaaaatatccaaaattattagcatattatgttattctcacaaagtcctaatgaacttcacaaatctgcctgctctattctgagtacaaaaaatatttagcctaatttgtttttccattattttatatagtaataaagtaataccaaaaatgttattgccagaaacaatacagtgttgtataattattagaaagtgaactcatgaaattctattaaaaaacaacaattaccacatgttaagtcagataattcacagaagagacttatatgaatactaggggagctgtaggcaacacaatttttctctgaatcctgcattttgaaggaagtttctgtcatttaattagttgaggtttgattcaccaaccaaaggtctatagtgtgatatattttcttcctccaacataaagttaacttaaagtcatttgtactttatgtgtttattctttcacttcttccccaaaagtaattctttaaattgctttatgggattaataacaaattatatcattatatatttttgtattattagggcttctaacttcattataatcaatttattggccatatataataatgcaacaaattacatctgtaaagtaaaattttatgacgcaatttacttagtatatgtataagtctcattctgctgcccaggctggagtgcagtggcgcgatcttggctcactgcaaccttcgcctcctcctgggttcaagcgattctcctgcctcagactcccaagtagctgggattacaggcatccgccaccatgcccagctaatttttgtatttttattagagacggggtttcaccatgttggccaggctggtctcaaactcttgacctcaaatgatccacccgcctcagcctcccaaagtgctgggattacatgcatgagccaccacacccggccggagacaggttctccctgacctgtgagactgcaaaggtggtgtttcctatgagtccagccagataatagactctgctaacattaattaaattaatattcctttttaagattctaggtgctgaatatatatctcttggtctataaattagcttcgcacttcagctatttagcaaacttgttttttattgtatctagtgtattcatactgaatgggtataatatactgtcttttgaaaaagttattttgtacacataatcttaaaacactcttccaagggcaaggtagaggcttcataatattatttccatttgtcagatcaatgaaggtttaatgatttgtccaagatctcaatttctagagaagcgaagaagaatcccccaattctagttctaagtttcttttttcccttgctaaatcctgcagtctactgatttttttttttttagacggagtctcgctctgttgcccaggctggagtgcaatggcatgatctcagctcactgcaacttccacctcctgggttcaagtgattctcctacatcagcctcccgagtagatgggattacaggtgcatgccaccatgcctggctaatttttgtatttttagtagagacggggtttcaccatgctggccaggctggtctcgagctcctgaccttgtgatccgcccaccttggcctcccaaagtgctgggattacaggcgtgagccaacatgcctggcctgcagtcaactgatttatgttcatcaccttcttaagttaaattgctcttttactcattgcctttggttttgtgtgttaagattcagcatcagcattcatgatatcttttcactcttaattctgagtgtttccgtccgtttttttaatttttgtactttatgggctttttcttcatttacccccaattatgcgggaaaggctgtgtgcctcttttgaaagctctgatgttctcaatgaagagaccttttaaatgaccttgtttgtcccccaccgagttgcatatcacaacttcaaatgtctcactaaaatgttacccatttggcatcagtatacagaaaaggctgcactctgagataagaaagaacagtggtgttttcatagtaagagaatagagttcttaatgggaaaggggagagtataatttccactgatttagctggtctttcaaactttatgatgcttttctccttgaactagcctataagaaatttgtagggaaaataccacaggaatcaaattttgggcatagatgtctattaatattgctccttacaaagctttttcccagaattgtttctccttgcctacaaaaactactccatgcctttattagtcagaaaagcagttttgtagagaaggcaagtaacagagaatcaagctaagtaagtgaaactctgtaattgtcaaacttccagaaagtaacatttgtaactaagtatggtatctttgtcctctctctttctctcttctctccacttggtttctaatgaaagccttgattacatgttatatttaatgtactgttccacaaagaagaaaaggcctaatgtgaatgcaagctgaatttacacttaaatattgcagtcagttcagaccggaaggatacagatcgatgccctctgatcctgtcagattccccgaagtgtctatggcagtgataccacaagagggcagggtttgacttccggactaggtggcttcctcccttcagtgcagaccttggggccacgacaacagccatcaatctcttgaaaccctaatgatgaatctgagctcaaattccctcttcagccttatctgtgcagaatcctgaagttatgaaaaatgcttacagaaggtaatttctagaatgatctaacacagcagatatttagtaaactccctgtttgagagctcctactaagcacccaacacagctttagactttggtcacccaataggattttatcttttgtgagggatctgtagttttccccggaagatataatgcatgaaataaaagcctccaataaaattcagtatacagttaatttatttcataaaaagtgagagatataaattatcaaaggttaaaacaaaaagtaggaaccagagcagggtttttcagtagcaactctattgacattttggattagataattttttggtgtgggagactgtcccacgcattgtaaaatggttagcagtatcacttgtctgcctgctagatgctagtaataccccccacacctccctctcccacattgggaaaatcaaaaatgtctcgagacattgccaaatatccctggagtacaaaatcagtctaattgagaggcactagactggagtataaagagatgaccatgccaaaaagtaaaaataataataatagagccttgaaacattacttacagaatgtcaaaaacgtaaggacctgctctctattcctgtttcttaacctgagcaatgggaataatgatgccttccctcataggtctcttgtagaaatgaaagcaattaatgcaacacttggcacatagtaagcatccaatgaataataagtgatcagtgttactattgctaatattaagccactattataagtcctttctgttaatcagcagaaacaaaaagaagtataaaataatggtacattaaatgaacttaaacacttgtatgtcattttgtgctaaagttatgaagctgaaaagattgaattgacattttccccattgatagaaatcatctcaaaaatgctccatcttccttgtgaaagccaaaggccagcagtttccacatacccagcatctgataagtagttaatgatccagaaataaactgttaggtgcttcagggaatttctgtgtatagagaagttccatgtaaatatttctccgagaggtggatggagaatgataattcacttttaccctctgaatttgatttataagcttcacctatctggcaggagataagaaccaaagttaactgaggagaaaaaaaataaatgatttcaagtgaccatgatcttcagctggaaccagttgaaactgcaaagcaactgggctgaagaagttcagccaaaattatttgtttataaaaactagagagtgttagatatttctatcacattggcttatttgaaatttctgctggctcaaatgaaattgtattcttctatttcctactgcggggttccttccctaaccacaattgcttttggattggagacttgtaactttgagaacaagaagagcctcagcttagctagctggaagaaccagaggagagttttaatatctcctgaagaaagaaaagcactaacacggttattatagttcaggacaagtggagtcaaagttgacagtttctgacttgaacagttttgttgctggtaataaaagcagaagtcacgtgctgaacgtgaaggtgagcagaggagaacttgcgatggcaaagttaaaaacaagaggagatgatggtcttggtgtggcacaggatgttaaaaaaattctcctgtccttaaggagttactgctatttgagtaatgtgccacttccctacatagccttctatgcagaaatgctatatttccacttcacaacccagaacgtgcattttattttacatttagaggaggaacaaacaaccagaaggcaaaaactggtgcattattttttgcaattctcttggaaagagttcgtttttaacttctgctcagacagcacacaactactgggaatatattttaatttcaaatctgatgtgtgacatctggtaactcatttattgctaatgaagttttcacaggaagcagcagtcaccagtagctcatcttatttttcagttggcaaagtgttgtttaccttttattggcctggcatcggtgtctcttatcacaggatatttaattagaaaacgcaagtagcctaacatagaaaagaaatggagtggtagataatagtagatagaatggtctaaatatttttattacagtgatgtaatatcactgtaatttatgtttaaaaattatgtaatactcaaaaggaattctcagagctggcgaaacagtctggtccaagcagcctctcagcagtgcctttcagcctcccctctctgagtctttccaccccttgctggtactttagtttcttccacttctagcaccacgtgtagtttcccaatttctcttacccaaatttgctcgcagggaaaaaaataaattaaattagccatttacaccacagtgtgaacttaataacaccaacaaaagttccaaagctctagggtctcatagcacctccagatccatgatctcattcggtgtttccaacaatgttttgcaccaaactggacacatgcttgctacttcatcatcctcatcgtgaacattattattattatcatcattttccagatgaagaaaatgaatcacaagtcaactgacagtccaaaggctccacagctcagaggaggtaaatcatgtgcttaattcagaacttttggctcccatcactatgctcttcccactgtcttaactctggttgtcacctgagccattgtgtttcttctcaggtagatcttagttcttcctgagaaggtatgaaggtgggtattccaccctacctgaattataggaatttcagatatctgtgagcagctgcaaaggggattttactagatgacatcctgctgggcacactttacgccagtcctgaatgtgtaatagaaatctgcagtttaatgagtaagtttctcatattcagtttttgatgcttcataaatgttaaatgaaaacattttagctgagggtacttttgttgtttgttggattggttttgcctgttcatcaggattatcagcatttaagccagagttgcaaattaagttgcctacagggcagtgcttttcaaatattagtgtgtatcagaattacctggagggctcattaaaaacagcttgccgaaccccacccacagagtttctgattcagtaggtctgtggtggggccagagatttacatctctaacaaatttctgggtgatgctgatgctgttgtttcagggaccacactttcagaaccattgctagaggggccaactaggggacgtctgtgagtaaaagcacctacactgtgcttccagtacagcagccagccccagtgtgatgagcacttgaaatgtcgctagtgtaactgaggtgtcctggaagcatacattataccctgggttttgaagacatggtacaaaaaatgtaaaatatcttaataattttatatggattacatgttgaaatgacaatagtttggatatattggattaaatattttatcaaaattaattttacctgttcctttttacatgtcaaatgtttttaatagaaaaattacaattatatatgtgtctcactttctatttcttttggacagcactgaactaaagaaccagaaaatagaggggtgtattagtgaactacagaaaattcaagtcccaaaagctgtaaatactctgaggaccaaagaaaatacatacgttgttcagatttgccctgaggggtcagtttgtacccaaacatttgctgccacaagtagtaaatgtagaagcaatgcaatatctactattttacttttctttcagggttaatcaagtgccttgttataattcttcaaactaaaaacattattataataatgaaaaatatttctgctgaacttccgaataaaaaaatttagtaatattttgaaagtctgagctttatttaattcattttacttacccttgtattatagaacaattatatttttaaaaatgcttttatgtcttccaaagaactttttatttttagcagtccatgaaatagaggtgagaacaggtgttggtattctcattctaaatatcttgtaatatttaaaggaaaccaaagtgaaagattaaattgccatgtaagattgtgttgccggttactggcagagcagactctttgccaggacagcagtccagtgctttctcttccaggctgttctgctcttcctcaatttttacagcatttttatgttaatcaatcaataaataaaaagtaaagaactataatgcatacaaaactgtgatggaagaaaaggaaactatgtgataaaatcaaataaatatgacccttatagctttagttttcttagaacagaggccctttaacttcagaatgttgaaaccttctcttgaagttctcttataatactctgccctcacctctgtgtttttatctgggcaattagaccacattaactaattgctaaactttaaaaagttgtattttcttacaaagaatctgagaatagggttgattttctatgttattttaacagtatcacattgcgcccccctcttcacaggaccatgtaatcttgactctctaacttcatggcaagcttttaattttgattttcaaccatgttccaaactgtactctttgacttggtagtgtcaataaataacgtaagggatgtctgacaggcttacagcctttggccataaatggaatgaaacaaagtagtccagatagggctcaaactcataacattgacctcgttagtctagaaccacaaccagctatccaaatgtgcctgggaaatatttctttgagtaatagttaattttttaaaagaaagaaaaaaacctgtgactatgataatcttatgttgagtttctttattcatcttgagtaaacagtaaatttttttcactttgttgtttcaatacaaagagttcttgtgtttaatatagaatattattaaattagtgtgggattaaaaatatttagatagctgatttaacaatatgtgatagcattaatcaactgccttgttataattcttgaaattgttattactctacttgtcaagcaattttgcccttctcgtcaaatgatgcatacctgttcaatggaaggattataaaagttcatgcttcggaaaatttttttttttttttttttttttttgagacggagtctcgctctgtcgcccaggctggagtgcagtggcgggatcttggctcactgcaagctccgcctcccgggttcacgccattctcctgcctcagcctcccaagtagctgggactacaggcgcccgccactacgcccggctaattttttgtatttttagtagagacggggtttcaccgttttagccgggatggtctcgatctcctgacctcgtgatccgcccgcctcggcctcccaaagtgctgggattacaggcgtgagccaccgcgcccggcccggaaaatttttttaagagtataaccaactccccgaggatacaggggtccagggaagctaaatgactgcttcaaggtcacccagccagtgagtgggaaagctaaaattagaacctcagtccgctcccacattttccaccaatttgcaggctatcgttaaagaatatttcttctgcaatcagaacattgagcaatttggaaaaacgtgtacagtatatcgaatattctagcttcatttaaaatttatggttatgtggcttgtataatgttaaaagctttaatctaaaatgaattgccatgtggccaataaccccaacataatactcataatgcatataaattctctaatattatcataatttcttaagggtacaaattaattagtacctcttttcctgcccaataactttcctcacaccccttaaaatggaatttgaaatgagataaacagttgctgctgctgaattaaagtttcaaagaaataaaagtgaggtggcttcatatacaaaatctgtagtttttttcacaaattggatgaagcaattgttattgactaagcccatattggtgctgcccttttctctgttgaaaagaaaagcttgtgagtagtctccaagagccatattattaaaaatgatgtttcctccccatgatggctgagatactaatccattgaaatgtggcgataattcttgtgagaaaattctatgagtctataagtttgaagaatttagaagtgtaagaggacaggggttcatttacttacaggccttcttccaagttaggttttattttccttttctcctagtctctggagtctcctctctccagacaccctggaaagccattcatggcctttcatatttaacataagagtatttaatactaacactaacatgtcgaaggaagatgtttaaagcatgtgaattagacttgatcatatatgtttcattggcacctgtttctctactttttggaataaaataaaaacgacaaaaacagctaagaattttggatagtgatgtgggtgggagggattggggcattcatcacaactgagttgtttaatttatagtaagtgggaacttttagagttgagagaagtttaattgtagtttagagtttcattattagacagtagtcttaaacaattcccaagaagctaaaatgtgggattaacattttactttcattgtaattcatatcctaaatataaatgttaatataaattataaagtttctgaatttcctttcataaaactgggttctttgggttcttagttattttggatgaaacaaggggagggctagttggaaatgatggaacatttaaccactgtcaccacagttagtcacaattggtacatgcagaattaataaagcagcttgccttgtttttatttcttgtgaggtcagatgacagtggatgatattgacttgggaagatggccagaagccactatttaccatgtacatatatcagagagccatttattaagtttgaggagattggatcttaagtacttaattagaatgacattaataattttaataaaatgttttgcattgagagaactattcactcagaaatagcaggggtgaacaaaatcatctccaaagaaatcatttaacatgaagttagtctaggattaccaaccaagagcatggcattctcccatgtatctgacttaaaagcaatacttgtctcttgccccatggtgccaggtggtctgccatgcttccctcttcgtggctgccaggattcccggtatagaggcaaatacaacctgtaaaggctcaaacgcttcatcaaaagccatgactataatccaaagctattaggtttaagcaacttatttggaaattatcaccttcaaataacatgtagggcaacctcagtagagatgaaatggacgaagcaggcatggaaactgcccttcctgccttaaatacagaatgccagatcacagctctgaataaaagttaagaccacattgggccagatcaggactaacactagatacacagctgagataaagttccagtgactttggcagtgtgaaagtcaggaccagtaggcacatatactgaaggcaatttaagctgtgtttcctgattaaagccagggactgaaaaatcactacctattcatgatgaaagactagaaaacttctgaagaccagacagagtttcagagtggtatagttactaatctactaaatactgcaaatatatagtatctgcaaatatatatataaggttgaaaactaggctcagaaatgagcattaaaaacttttccagatcaagggagtgctgtacccccaagctgaggtttcataggctaccatcatccaggcactcagtcttcccaagcaagttaattcccaccaaaaatgaacacagtcaaagattacaaaacctaagcagaagtccattatcaagaaacagtgtccacaagtgcaataaatataatttatacctgaggaactataaatagtagagcaattgggtaggggctcttaacagacagatattcaaaatgttaaggaaaataaaagaagaagtagacttcgtaaaataggaacagagggctaagaaataagaacaagtagatctgaaaaagaaacgagtaaaaagcctagaaatattagtgccaatttctatgggtcaatgatttcacaagtgaatagctaacagttatttcctgtggccttacttggcagagagaggtgggggaagcaacataggagcagaaacagttcctttctaagtctgacttataaaataggaacaataaagacaacagtttattgaacaggatggtttattgagctgtccagcactataagcaaatggcttacaaacattttcctactctttttgatgcttgagagagatactttgatagaagattattccaaaatataattacttggtcatttagttctctctttattatcataggaaactatggggaatttttttttctttagattgcaaactagttttaaaaagagcttgtaatgaacaatttaattagattggttttggcttgcctaaaagcttaagaaggtattaatattctaatcaaaagtcttgggaaagcattcttagaataaaaaaaggaaagaaaatcttcattcttatgctttaagaaccaggaaagctgtcaaaggatataaggtaactcttacaaaagcaattgtaaaataaacgtggtttggccacaatgagccaacacctatgtttgccacagacttagattcccacctcactcatggcaaatttattcagctgcttaagattattttttactcatacttcgaaagaacaacagcctggaatttttagacttttaatggcaatggaaggaacttacctatgataaacatttttctttactctcacgctttcttaacccatggctgttctgagtcaatgtttgccttgcattcaaaaaataatagtaaagattcaagtaaaacatattcattaagcactatttgaaagatataccaagtgctttaacattatctcactttattcctacaaagatcatgtgcaataaatatcactgttcatgtttcctacagatgaaaaaaaactgagggtcatgttcagagaaattggatgacttacccagagccacacagatttgtacgtggcaaaggaggattccatttcaagtctttcaaccccaaattcatcttcctttctctaaggggaaatggtgctatggaattcatgtaagccacagagcttggataaaaggaatagtaagaccaaaaataggaaaagtaggaagaggtggatcctcctatgtttttaatcagggttctatctacctgtaactcttctgggaaaagaagcaggatgtgactgaaacatagctgctttctagatctcacaaatctggcttttctagtcaatcacatctctctctccttcggcttctcaccaaaccagcatccgttcagcttcaaagaaaaaagagccctactgtttcccactcatttatcatcaatctaaagtaactgccaatcacaaaagtcccatctttatttctttccttagaaacaaatttctctagggaagcttatcagtagcagaagtgcagactgggaaatggcctatgtcaccctcccatctagaaatgcccagtgcacatccagatcccacacccccaagagcgttgtgcaatatctgttaatttatgagagctgtttcccatagatgatgctgcaggcattagtaaggagggcaaagttcaagtgatgacaccatctctactccacctggctggtttccaggtgccatctcctgatccctctccccacccccactgccctctcaccatccttcccccaaaccccacactccccaccaatctgggtcagtgataaacacagagtattccacatgcctctgatatgatgtaacattcgacacactaaagataatactgcctttaaggctcctgtccccctggctagacttaaactgtgtagaggaggagaactgtgactttattccccttgcatcctggacacccacacatggtaggtgttcagtgaatatgtgatgagttggtgaatacccactgaatgtgctatttgcattgctacttccttgtgcttccttccactgtttctatcgcctaaaattcttctccctttttcctccaccctcgagtaggaaaaaatttgtttctttattgggcagggagttctggtcattatacatttatgtaaaatgttcttctaattggcatattccatgctatgtccagattctttcaagcgaattctcattaaggtaataatacctcaccgaagtttccagggatgatcccctagctgttcaaagctaccttttatatattaaataccagtcaatatgaatcaatggtaactgaaaaaaaggctgatagcttgtgaaggagttggagtacaaaactatgcctataaattgatcctcacaaaggcagactttttcccacagaaattgtattatgaatgctagttatagtttgagactagttaataaaattctactcactccaaacataggattaatggaacccacatgagttgtgtgctgtcaaagtcgagtcaagaggagagagaaggagaagaaaatttcctccctgttctcatagctcagggcacccaagggattctagagcgtaaagtgtactcccttctattttttactgcccttattcccaagctgaaccaaatatttacctctgccctcattttcagttatggagttcactcaggcccttttcaaccttcgaggttccttaacctttacattattaattctttttctaagcaaaatccagctgatctctactagatggttaaaaggatagtaaataggtaaattaatccacattaagccacaaatgactgctagccctaaccctttaatgactaattaatttttaataaagaatatgtgtctatataaatgaatttatacttctaagttggcataagttcagaaaaaatagtaagatgaactggaaaatctacaaggtatagggaaatcctctgggtgaggaagaactagtcatacctccctaaaagcctagccctagtttctgttacattatttcttcttttcatcttctgttttctaaaccacaagtttctaaaagcaccaaggaattttctacctgtttatttcgttttgtttttgtttctgtttttttgtccaaggtgaggcccaagttgacactgagtattctctgtgaaactctgcaaggagcaacatgtgatttcacagaaattagtctcgatacactatattcatggctgtaagttctatgctgctcacccattcatttgtccattcagtcactcattcatgagacatttatcatctgcctcctggaacataccagggcctacaccagaaaacaaggaaacaagtaaacactagtaaactttaaacaggctctccccacaagcaactgacagaccagtggagaagacagatatgtcaacagatgattacaataaagtttcaaggccgggtgcggtggctcacgcctgtaattccaacattttgggaggccaaggcgggtggatcacccgaagtcaggagttcaagagcagcctggccaacatggcaaaaccccgtctctactaaaaataaaaaaattagctgggcatgatggtacacactggtagtcccagctactagggaagctgaggcatgagaatcacttgaacctgggaggtagagatcgcagtgagccaagatcgcaccactgcactccagcctgggcaatacagtgacactctgtctcagaaaaaaaaaaaaaaagtgtcaaacctacatccaaaatgtcaaagtgctcaaaaaagttgggaaggcttcaccaaagatgtgacatttagggtagataacacctgtttgtggatactaatgtcctggtgagtcaaagaagaaaaggatgtacattatataagctggatgcaaaaaggaacaataatgaggacatgcaaccaaaaacttacatagggagaacaactttacttactcagggaaggcaaagagaccacttaagaactccttcacatgtgttatgtcttaaaagctgactactggagttgtatcccttgcacagcatccctttgcaccaaagtgaacactactctaagaacatgtgttcagctctcctgaatgccaagcacaaccatgcttggcatggcagtggtgtcttatttctgctcctctttttccccagggcatgccattgcaagagaatgctcagccatgttcatctggggacctgctcctggtagagcaataggatctgtgtgcccagcaccactgcccacctagctgtcctggcctgtgcccaatgctgaccttcacctcagagtgtggctgtaccacattcggtgatgtcactctcactgaaccttcagcctccttcctgggacttcctgatggactgttatccagggcagaatgtgttgattttctaaatcacataaatgaatagcttgactgttgattatgtagaaaatcagagcaaatatttgcatggctttgtgcagcccattcttgagcatctgattctccccagaattctaaaaaacctgctgctttctcaagccctcagtaaagacatgctttcttgataatcctagccaaacctattcatttgacatctttgttacacaaatggttaaccacagagttaacttcagaaatggctggcaggtatgaaggttagaagattcatgcacttttgctagactgaattggaagttaaagagtaagtagttactgactgcagaggcctggaaaaccatggaaaaaatcctattcctcaaagtcgagccctacctcctacgcctcttaaatcaattgccacagtgaccaatttgtcagtcacctaaaggcagctatcctgaccacttaagggagaatacttataatctttatacctaagtaaagattgtgagaggaaagaaatggtttaaagaatatgaatgtgtcacacttctgaggttaatgataaatgaattggtcctgcttacctcaggaaaaactttcaagtctttctgaaaaactaatttaattcagtagtattttctaagatttaggttatgtttttaatcaatttggaaaccaagatttacttatagaaaaaaaggaaaaggacctagataggtttattcacatagaatcccaatttcacttctctggatgataccattttctacaaaagcaattatgttctaaaatttaagtgtgctttcttaggctttatcagttcacagtgtttccttaagaaatatgatccagtattttttcctaagactaaagttgagttactacgtttatgactgagaaatgaatgtttgttagtttgtttgtttacaataagaattttttctttaccattttatttttattttccccaggtgtatttgatatagtgtttgcaacaaattcgacccaggtgatcaaaatgattctcaactcttctactgaagatggtattaaaagaatccaagatgattgtcccaaagctggaaggcataattacatatttgtcatgattcctactttatacagtatcatctttgtggtgggaatatttggaaacagcttggtggtgatagtcatttacttttatatgaagctgaagactgtggccagtgtttttcttttgaatttagcactggctgacttatgctttttactgactttgccactatgggctgtctacacagctatggaataccgctggccctttggcaattacctatgtaagattgcttcagccagcgtcagtttcaacctgtacgctagtgtgtttctactcacgtgtctcagcattgatcgatacctggctattgttcacccaatgaagtcccgccttcgacgcacaatgcttgtagccaaagtcacctgcatcatcatttggctgctggcaggcttggccagtttgccagctataatccatcgaaatgtatttttcattgagaacaccaatattacagtttgtgctttccattatgagtcccaaaattcaaccctcccgatagggctgggcctgaccaaaaatatactgggtttcctgtttccttttctgatcattcttacaagttatactcttatttggaaggccctaaagaaggcttatgaaattcagaagaacaaaccaagaaatgatgatatttttaagataattatggcaattgtgcttttctttttcttttcctggattccccaccaaatattcacttttctggatgtattgattcaactaggcatcatacgtgactgtagaattgcagatattgtggacacggccatgcctatcaccatttgtatagcttattttaacaattgcctgaatcctcttttttatggctttctggggaaaaaatttaaaagatattttctccagcttctaaaatatattcccccaaaagccaaatcccactcaaacctttcaacaaaaatgagcacgctttcctaccgcccctcagataatgtaagctcatccaccaagaagcctgcaccatgttttgaggttgagtgacatgttcgaaacctgtccataaagtaattttgtgaaagaaggagcaagagaacattcctctgcagcacttcactaccaaatgagccttagctacttttcagaattgaaggagaaaatgcattatgtggactgaaccgacttttctaaagctctgaacaaaagcttttctttccttttgcaacaagacaaagcaaagccacattttgcattagacagatgacggctgctcgaagaacaatgtcagaaactcgatgaatgtgttgatttgagaaattttactgacagaaatgcaatctccctagcctgcttttgtcctgttattttttatttccacataaaggtatttagaatatattaaatcgttagaggagcaacaggagatgagagttccagattgttctgtccagtttccaaagggcagtaaagttttcgtgccggttttcagctattagcaactgtgctacacttgcacctggtactgcacattttgtacaaagatatgctaagcagtagtcgtcaagttgcagatctttttgtgaaattcaacctgtgtcttataggtttacactgccaaaacaatgcccgtaagatggcttatttgtataatggtgttactaaagtcacatataaaagttaaactacttgtaaaggtgctgcactggtcccaagtagtagtgtcttcctagtatattagtttgatttaatatctgagaagtgtatatagtttgtggtaaaaagattatatatcataaagtatgccttcctgtttaaaaaaagtatatattctacacatatatatatatgtatatctatatctctaaactgctgttaattgattaaaatctggcaaagttatatttactttaaaataaaataattttattgcaatgtatttatcttcattacttaaaatagatgctaatttattttaaaataagactaccttgaatgagtatgaatatatttttatttaaattttgatacaactgatagtttaatactattggttatagattttttatcctgacattgaaaagttaaagaaaaaacattttgttctactgcatgtcatggaataaacacatcgttttgaatttttcagtttttcacataacaaagaaaaaaattaactcttgctataatgctagaataatacattattttacaagtaatttaataacagaatttttctaattgtatacattatcattgtaggaaagttagaagatatagaataacataaaaataaaagtcatgtttagcttccccggtcaaaaatcattattttaacatttgggaactttattttctacttttttcattcattatacacacatatatgtgtcaatcctgatactgaagtcatgatgtgtatagtactttgtatacagatctttcacttaatgtcatagcatagtagtttcctacccaattaaatatttttctaaaacattttaatatttgtataatactacaaaatatggacatacgctgatatagttaactagtcaccaaattggaaaattgagctttttctgatttttttagtatcataaattacactgagatgagcattcaatatgtgaatctgagaaatttcccatactcctagaagtggtgcaactgaaatacacgtatgaacattttttaatagtctaactacctgttatcaaatatttcccagaaaacataacaatttacaataccaccaactaggtatgaatatatatcaccataacctcagaatggggtatttactaaattttttttttttcagacagggtctcactctgtcccccaggctggagtgcagtggtgtgatctcggctcactgcaacctcccactgctagattcaggcaatcctcccacctcagcctcctgaatagctgggactacaggcctgctccaccactcttggctaatattttttacttttttacagagatggaggtctcactatactccctaagctggtctcaaaactcctggcctcaagtgttcttcccaccttggcctcctaaaatgctggaattacaggcatgagccaccacacccagcctaaatttaagcagaaaagaaagatttaccgtaaggatccagctgccacatgcaagggccaggatgcaactgtgcctgaaaattgtacttttaacatttctgctcccatcggacagttgcttcattcttctatttaaaggatttcagtgcttctgaagttcatacagggcagaccgaagtgctcattctggtcaaataaactgtggccaaagggttggagttatgcgtaaaataattgatggttgctgtgggcaagggggtgtcatctcagagagaggccttggccactgggcagaatttccacaaagcagactatattaccttcacattcccaaatataaagtttttgtgaacaaatatggttccatatgccttatattatttatattatttttatattatttttaatttcattaatgtaatgccagccactcaccccaaaggtcttctactattttcacaaaggatcacctcaaaaaaataaattttaccttatcccaagtgatagcataaatatcctatataaaatccctccaggcctccaggtcagctttataactgtttttttttttttttcagtagttgaggattttttgtgtgtgtttgtttttgttgttgttttgttctgttctgttctgttctgttttgttttgttttgttttttgagacagagtctcgttctgttgcccagtctggagtgcagtagtgtgatctcagtccactgcaacctccgcctcccaggttcaagcgattttcctgcctcagcctcccaagtaactgggattacaggcacgcatcaccacacctggctaatttttgtatttttagtagagatgggttttcactaggttggccaggctggtcttaaactcctgacttcaggtgatctgcccgcctcagcctcccaaaatgctgggattacaggtgtgagccaccatgccctactcaatagtcattttaatccaagtgattgtaagcattttaaacttgctgaactatttcataggttatagttggcaagatttctgatagataattgtatttagatatcccctatatcatgtatttattaatggtgttaataacatgttccattcatcaaattatattgggattttaccccatctcacttgtgaaatagatgttactaaccttgatgattattctttctttttcagtgagatcaacataatcttggagttgagaccctacttacaaaatgttaggataggatgccattatgtattcttcatgaaaatatttacaggttaggtagactccttatttttggtacatttaaaaaatacatacagaaaagaatatttaccatagagatctaggtgcccaacagaatgcaaaagctacatttatattgaaatatatatttcaatatacacccatttacacccatttctgaggtgtaaatttcaatatacacaatattaaaatttacctcattctaagcttttggggaaaaaaaggctagtcatttctaatgctggctctttctcattgtggaaattcatctttttggacatcagttacatcatttttcaagtacggtgagttggcttggtgaaagaaggcttttatattttatattttattttattttattttattttattttattttattttattttatttttgagatggagtttcactcttgttgcccaggctggagtgcaatggcatgatctaggctcactgcaacctccacctcctgggttcaagcaattctcctgcttcagcctcccatgtagctgggattacaggtgcctgccaccacacccagctaactttttgtatttttagtagagagggtttcatcatattggccaggctggtctcgaactcctgacctcaggtgatccatctgcctcggcctcccaaagtgccgggattataggcgtgagccaccgcgcccagcgtgaaggcttctatttagttaataattcactcattcatggatttaataagtgttgtattgtttccctactctgtgctgggtaacaagtgctgtgtaacatatagcagcttagcatgtaggataaacttgttgctcagctgctgtgagcagtgtgaaggagagccaagtgagaagcagcttgattgcaaatcacagaaaggctctcagagttttgataccacaggtttttcagtttcataactctgtatactggtgcatttttttccaacaatatgtgccaatctaggaagcccaagaagagaaaatagattgaagcaggtcacaaaagtgtgaatgaagaaaacaagtttcaaggaatttcggatacttggtatgaagagtgagatatctgagggtaaagaaagtaaatcaagagtaagagagatacagagagactgagtggacaggaggctggaagcagtcacacactgcccccaaggccagggttcagacctcacaggagagatacatacagtcagggccccaggaccatgttggatccactggacccagaccaaccagaggaagagggaacccaaatattagagtgggaagcaagtcataaacagtagacagaatggtatggggcaagcccttaaccatatggattttatatagttcaggctgtatgactgtatattggagctaatcagagagtcaaattttccaaattcaaaatcttgactgagtcagttaacatatgacatctgtaactatatccagtcttgtctacttgtgtagtgaacactcatggaaccatctgaacagtgtccattctcccctcatcgcaggaatagttctgccccactcagggacagcaccacctcagaatgaaccattttcctacctaactccatccccaggccacagttaattggtccaggcttgaagtggaccaatcacagtttttcatgaggatttttcaaacaggcgctgatgaagagctggccccagtgttggcatttctgagacgtaagctcaacaccagccacatctctcaccacgtggaagaagctagtctgcaacagagtgaagtaaacagaaaaggcaagagagccctgaaggtgcttgagtccttgattctacctgcgtcttatgtccagctaaatccctgcccactcctctctaatcaagggaccagaatacagtgatctatagctaagatctgcaagtgtttcttcccgcttatgatcaataagaatttcccttttgtagtgtccagcacatcatccattggccacccagcagaagtgataccgtctacatcccaaaacttattggtccctatcttaataaggggtcacaagtgctaccccacttccatatgtctccttgtgagatggtaacagccaggacattcaatagtgtgtgttaagggggaagaggtgtggagatatagacgtaccaatagtgagagggggctgaggctactacactatctactattgcaaattattgtaaactgaagtctctccctgagatggcacaggggtaaaatacacttctgttgcatgagcaattataaaaaatatgatttagaccatgaaatcataagcagagagaggaaattagtgctcctcaccacttgagggcccaaatgcatggcttgcatgttgcctgggctctctttacctgacagtgacctgggagttctctgggtatcatagagccagtgagcacagcatccaaacctgccaaaatccaatggaaaaggccttcatttaccaagctaacacaacttacatgagaaattatataactgaagttgaaaagatgcatttcaacaatcaggaagagccagaattagaaatcagactgttttttttttccagaagctgagaataagagaagttagctttagtaatatttaattctaaatcattcctatactaggaagctttgtataataatcctttaagagtttaaagaccatgagatttacccttcaagcagtgtaataggaaaatatttatctatatgcacaagagatgtaaatttgatgaaaaaatgatgttaattttaaaactattaaaagccagtttgctattatgattattttgcttcaagtatccaaatgatgatgagccaaatatgcccctgagcccagttcttgattcattccacgtcctataaagattctttagaaaaattgaacaagatgagaaatagggatcctggctcaacctcccagtgagttgggatttatctcatggaactttttcccaagcttgatgaagttctgctgtgccatatggacatgtacagttgctaaatgataattttccaaaaataagcttcaattctccaaaatggcagatagaaagcagctggtgttactcaacagagataagccctcctagagctcaccacagagaggagagcatcatgtctgcagatgccacagcagatctgctgagaatcagccagcgccatgtgacacaagaacccacagatgcagattcgtcctgactggtggctttcttctggccattgctgttacagagaagtttctaagcagtactcaatgcacacaaaactaagtagaggctatataggcaattcttcaaataagcaatcattattctcagtaattcttgtagtaagtggatggtaggaggaaaaaaaaatacctttccactgatgatatcacctttatagctatttcttgagtctccctatcttttccaccttcttcaagaaatagtcccctattacaatttgcatgcccactcttgctgcagaatttgtataggggctcaactctcattattgccaactatatgatttggaccatggatgtgagaagacttcagcaaatcaatccatcacattcctctggctgcaatgagttgggcacataacctaaatgaacacaattatggtgaatttcctggttttgccaggagctatcagacaaaaagcttgttctttcccactctatagtggatgtgaggagttgttgtagccatttgtcactccaaaggagaggtggtgtttccagaagttgtcacagtgtgtacttataccataagtatggagccaacatagtgaaagactggacaaagaatggaaatgaatcaagtccttatgacatcattggagagttgactttttgtgctagaaatttgcactgtcctccagatctccctatcttaagcagttggggatgggttttctgtcaaaattatccacgagaatttaatcttctgcaaaattattatagttatcatttattgagttctgattataggacaggcatagaattctctgcttatatgcattatattatttaatcctcacaacacccagtcatgctatttctgttattatcctatgagacaaaaaaaaaaacacagattttacataatcagtccaatgtaacatgactggtaaatgttggtgttgacatttgaaatcaggcattctgactccagaatctgtgctcttatttgctaagctatgttgctttcctctgctcctcacctctcccctgaccccccaaaaatggcattacaaaatatgagtcatgtaggtactttccaatatattatccaagcctatttatccaaaatcaatacagtaatattttactttgtctgaaaccgatctcactggatttcaagatagaattttaatagtctttgtccttgaaaattgggctcactaatggaaagcactaattgaccttaaaaagcataacactggattttacatttattgtaatgtgattttggatgagcttatattgggtctagcaaataaacaggctacaactgttaactgtcatagtaattagttaaatgctctggtcctttctgcagccaggaatttagatagcacttactaaatgggaggggaaaggaaattcctaaatttattttcatatcaaagttttaacttcttacagcctaacagaatgatgttctttaaaatatatatgttttaaagaaactacattatattctgagaaaaatttccttttaaggtgtgcagtacaggtttggcaacagattttggtgaagaatagaactggaataattaaaagtatgacttatttcaactgtgcacagagacccagaggataaagatgttatgatcataccatgagtcctaaggacagttgtagcagcatcattgaaaactacctcaacatggatgctatttaagaccttgagaggtaaggagagagttgcaacagaaaagataaaaaatgcttactgcttcaccttttgcttctggctgcagaacaagtagaaaggagcaattacacccaaaacgttaaaaaaaaaaaaaaagcaattaggctaaaggctgaggaaatgatcataacatgatggaagttccagcagccaagatcaatcagaaagtagctatgtagcctatcatgataggaaagctgggcatagacatagatcagtgttttccaaccaagtgtgggccaggagtggtggctcacgcctgtaatcccagctactcatgaggctgaggcaggagaatcacttgaacctgttagatggaggttgcagttagccaagactgtgccactgcactccagcctgggcgacagaccaagactcagtctcaaaaaaaaaaaaaaaaaaaaaaaaaccccaaaaatggaaaaccaaccaagtgtgattggccaaatccccaggggacatttggccatgtctggaatcacttttggttgtcgcaactgaaagaggagagtgccactggcacttagtaggtagaggccagggatgctgccaaacatcctgcaatgcacagaacagtcccacacaacaaagaactatctggtacaaaatatcaattgtgccaaggctgaggtccctggggtagatgaggaagggaagagcaccatgtgaatgctgcagtaaattgtgctaaataatgaagtgccagtctcccagttcttataacctctaaagtgtctctccctctctctttttcctgtgctcacactcactttctcagattgcattacatgtgaacttcatccaaatgacctaattcatggggaaattgtgttaaaaaaaattgggggggcaggcagtgtcatttctggggctaagtagacaagtctattaagcttctgcaaaaaaaaaaaaaaaagtttattcactcattaacgttaggaacaaaggcagctggtagcatgggataaacctaaagggttataacccacttccatgggagacaaaatgaaggtgtgggttccagtgggaaactaatcctcagagaagacactaagtgcagaaataaaacatgtaagcatgtggtgctgctggctgctccaccaggacactctacagtatcttagcatttgctatgagtctgatgaaaatttttattgaacaaaatcaaaggtgtattttatttttactctaaatatttccataggggatttgagtggctttcaatgaaaagcacattaaaacagggtaatataaaagaaaccagacagatgaatcacaaaaaggaagaagcaaaaccattgactgtacagacaaaaaggtgttgtgacagataagaatattgggttcacaacttcttgcagccaggttgaaaaggcatcactaaaactccagttctttttatcaaaacaagtgcagaacaggtccccatatggagcagtcttttcgacattgaattcctaaggaaatttctcacgttggactgtggatagagacatagagtcacagagggatcgtttttaagcatcattttttatttcagcctgattcttagttggttgttctcggaatgttcttcttaaaacccaagagcatgacaccaattcaatgaagcttggtgatgtaagggtatccagcactgtgagataagagtcacccaatggtgtacttgacaggcacagcaatgtccttatgatgtcaatggggacctctgggtccactgaaaccttagataagataggcttagactccctgaaacagtgcaagatctccagaaatttccacagaagcctgaggagcttatgtgttcgtggtctcctttagtttttgccatctgcctttccagttcagtttagagattatgatctcactactccacactgtaagatgccatattattccatggctgtaagatgccgtattccatgtgaaacagctccaattacacacacacacacacacacacacacacacacactcaacagcacactaacatgctatgtcattagggattacctttgattcaaaaagtcctttgtcccttggaacatttctcctctggactccatgcagtcccagacttcactccatctcacagatcattcccttccttctctgcatcctttccttttttatcaccaactcccttgaagaagtaaatccactttgtatttcctcacccctagcaccctagccattcgtctcattaactactcccttctgaatgtcacacatcctttctttcctgcaaagtttcctcttc

SEQ ID NO: 83 - protein, 359 aa, Homo sapiens [sequence omitted]

SEQ ID NO: 84 - DNA, 3089 bp, Homo sapiens
  CDS (172)..(2397)
gggagcgcggggagcgcgggccggcggcggcgagggaggacgggggcgcagacggccggcgcgcggcgcggctaccatgggcgtgcggtgagcagccgctcgggacgacttcctcggctgcgcggcgctcgcgcggagctccccggccggcggtgcgtccccacggtcaccatgaaagacgacttcgcagaggaggaggaggtgcaatccttcggttacaagcggtttggtattcaggaaggaacacaatgtaccaaatgtaaaaataactgggcactgaagttttctatcatattattatacattttgtgtgccttgctaacaatcacagtagccattttgggatataaagttgtagagaaaatggacaatgtcacaggtggcatggaaacatctcgccaaacctatgatgacaagctcacagcagtggaaagtgacctgaaaaaattaggtgaccaaactgggaagaaagctatcagcaccaactcagaactctccaccttcagatcagacattctagatctccgtcagcaacttcgtgagattacagaaaaaaccagcaagaacaaggatacgctggagaagttacaggcgagcggggatgctctggtggacaggcagagtcaattgaaagaaactttggagaataactctttcctcatcaccactgtaaacaaaaccctccaggcgtataatggctatgtcacgaatctgcagcaagataccagcgtgctccagggcaatctgcagaaccaaatgtattctcataatgtggtcatcatgaacctcaacaacctgaacctgacccaggtgcagcagaggaacctcatcacgaatctgcagcggtctgtggatgacacaagccaggctatccagcgaatcaagaacgactttcaaaatctgcagcaggtttttcttcaagccaagaaggacacggattggctgaaggagaaagtgcagagcttgcagacactggctgccaacaactctgcgttggccaaagccaacaacgacaccctggaggatatgaacagccagctcaactcattcacaggtcagatggagaacatcaccactatctctcaagccaacgagcagaacctgaaagacctgcaggacttacacaaagatgcagagaatagaacagccatcaagttcaaccaactggaggaacgcttccagctctttgagacggatattgtgaacatcattagcaatatcagttacacagcccaccacctgcggacgctgaccagcaatctaaatgaagtcaggaccacttgcacagatacccttaccaaacacacagatgatctgacctccttgaataataccctggccaacatccgtttggattctgtttctctcaggatgcaacaagatttgatgaggtcgaggttagacactgaagtagccaacttatcagtgattatggaagaaatgaagctagtagactccaagcatggtcagctcatcaagaattttacaatactacaaggtccaccgggccccaggggtccaagaggtgacagaggatcccagggaccccctggcccaactggcaacaagggacagaaaggagagaagggggagcctggaccacctggccctgcgggtgagagaggcccaattggaccagctggtccccccggagagcgtggcggcaaaggatctaaaggctcccagggccccaaaggctcccgtggttcccctgggaagcccggccctcagggccccagtggggacccaggccccccgggcccaccaggcaaagagggactccccggccctcagggccctcctggcttccagggacttcagggcaccgttggggagcctggggtgcctggacctcggggactgccaggcttgcctggggtaccaggcatgccaggccccaagggcccccccggccctcctggcccatcaggagcggtggtgcccctggccctgcagaatgagccaaccccggcaccggaggacaatggctgcccgcctcactggaagaacttcacagacaaatgctactatttttcagttgagaaagaaatttttgaggatgcaaagcttttctgtgaagacaagtcttcacatcttgttttcataaacactagagaggaacagcaatggataaaaaaacagatggtagggagagagagccactggatcggcctcacagactcagagcgtgaaaatgaatggaagtggctggatgggacatctccagactacaaaaattggaaagctggacagccggataactggggtcatggccatgggccaggagaagactgtgctgggttgatttatgctgggcagtggaacgatttccaatgtgaagacgtcaataacttcatttgcgaaaaagacagggagacagtactgtcatctgcattataacggactgtgatgggatcacatgagcaaattttcagctctcaaaggcaaaggacactcctttctaattgcatcaccttctcatcagattgaaaaaaaaaaagcactgaaaaccaattactgaaaaaaaattgacagctagtgttttttaccatccgtcattacccaaagacttgggaactaaaatgttccccagggtgatatgctgattttcattgtgcacatggactgaatcacatagattctcctccgtcagtaaccgtgcgattatacaaattatgtcttccaaagtatggaacactccaatcagaaaaaggttatcattggtcgttgagttatgggaagaacttaagcatatactgtgtaaacagtgccatacatttctaaaatcccaagtgtaggaaaaatatgcagacatacagatatataggccaactattagtaataatatgaaatatacttaaagagcttttaaaactttgtatttttgtacaaaatatttgtcttttacaatttttttcctttttttttttttgtcattttaccgacataatacatggagccaaagaaaacaataatggtactaataaaaactcctagggtttcctgtcagatttaattctacccagtggcaaagaattttttcaattgtggctttaaaaaaataattaaatatacatgtatatatatat

SEQ ID NO: 85 - protein, 742 aa, Homo sapiens
MKDDFAEEEEVQSFGYKRFGIQEGTQCTKCKNNWALKFSIILLYILCALLTITVAILGYKVVEKMDNVTGGMETSRQTYDDKLTAVESDLKKLGDQTGKKAISTNSELSTFRSDILDLRQQLREITEKTSKNKDTLEKLQASGDALVDRQSQLKETLENNSFLITTVNKTLQAYNGYVTNLQQDTSVLQGNLQNQMYSHNVVIMNLNNLNLTQVQQRNLITNLQRSVDDTSQAIQRIKNDFQNLQQVFLQAKKDTDWLKEKVQSLQTLAANNSALAKANNDTLEDMNSQLNSFTGQMENITTISQANEQNLKDLQDLHKDAENRTAIKFNQLEERFQLFETDIVNIISNISYTAHHLRTLTSNLNEVRTTCTDTLTKHTDDLTSLNNTLANIRLDSVSLRMQQDLMRSRLDTEVANLSVIMEEMKLVDSKHGQLIKNFTILQGPPGPRGPRGDRGSQGPPGPTGNKGQKGEKGEPGPPGPAGERGPIGPAGPPGERGGKGSKGSQGPKGSRGSPGKPGPQGPSGDPGPPGPPGKEGLPGPQGPPGFQGLQGTVGEPGVPGPRGLPGLPGVPGMPGPKGPPGPPGPSGAVVPLALQNEPTPAPEDNGCPPHWKNFTDKCYYFSVEKEIFEDAKLFCEDKSSHLVFINTREEQQWIKKQMVGRESHWIGLTDSERENEWKWLDGTSPDYKNWKAGQPDNWGHGHGPGEDCAGLIYAGQWNDFQCEDVNNFICEKDRETVLSSAL

SEQ ID NO: 86 - DNA, 953 bp, Homo sapiens
  CDS (89)..(553)
agtccctgcattgcgcgcgacccggcggcgggacaggcttgctgcttcctcctcctcggcctcaccattccagaccaaaattgaaaaaatggttgacctcacccaggtaatggatgatgaagtattcatggcttttgcatcctatgcaacaattattctttcaaaaatgatgcttatgagtactgcaactgcattctatagattgacaagaaaggtttttgccaatccagaagactgtgtagcatttggcaaaggagaaaatgccaagaagtatcttcgaacagatgacagagtagaacgtgtacgcagagcccacctgaatgaccttgaaaatattattccatttcttggaattggcctcctgtattccttgagtggtcccgacccctctacagccatcctgcacttcagactatttgtcggagcacggatctaccacaccattgcatatttgacaccccttccccagccaaatagagctttgagtttttttgttggatatggagttactctttccatggcttacaggttgctgaaaagtaaattgtacctgtaaagaaaatcatacaactcagcatccagttggctttttaagaattctgtacttccaatttataatgaatactttcttagattttaggtaggaggggagcagaggaattatgaactggggtaaacccattttgaatattagcattgccaatatcctgtattcttgttttacatttggattagaaatttaacatagtaattcttaagtcttttgtctgatttttaaagtactttcttataaatttggatcatgttatgatttgtaacattcacacaacacctcacttttgaatctataaaagaattgcacgtatgagaaacctatatttcaatactgctgaaacagacatgaaataaagaatttaaagaatcaaaaaaaaaaaaaaaaaaaaaaaaaaaaa

SEQ ID NO: 87 - protein, 155 aa, Homo sapiens
MVDLTQVMDDEVFMAFASYATIILSKMMLMSTATAFYRLTRKVFANPEDCVAFGKGENAKKYLRTDDRVERVRRAHLNDLENIIPFLGIGLLYSLSGPDPSTAILHFRLFVGARIYHTIAYLTPLPQPNRALSFFVGYGVTLSMAYRLLKSKLYL

SEQ ID NO: 88 - DNA, 3915 bp, Homo sapiens
  CDS (243)..(1730)
gtggggtggggtggggctgggggcttgtcgccctttcaggctccaccctttgcggagattataaatagtcatgatcccagcgagacccagagatgcctgtaatggtgagactttggatccttcctgaggacgtggagaaaactttctgctgagaaggacattttgaaggttttgttggctgaaaaagctgtttctggaatcacccctagatctttcttgaagacttgaattagattacagcgatggggacacagaaggtcaccccagctctgatatttgccatcacagttgctacaatcggctctttccaatttggctacaacactggggtcatcaatgctcctgagaagatcataaaggaatttatcaataaaactttgacggacaagggaaatgccccaccctctgaggtgctgctcacgtctctctggtccttgtctgtggccatattttccgtcgggggtatgatcggctccttttccgtcggactcttcgtcaaccgctttggcaggcgcaattcaatgctgattgtcaacctgttggctgtcactggtggctgctttatgggactgtgtaaagtagctaagtcggttgaaatgctgatcctgggtcgcttggttattggcctcttctgcggactctgcacaggttttgtgcccatgtacattggagagatctcgcctactgccctgcggggtgcctttggcactctcaaccagctgggcatcgttgttggaattctggtggcccagatctttggtctggaattcatccttgggtctgaagagctatggccgctgctactgggttttaccatccttcctgctatcctacaaagtgcagcccttccattttgccctgaaagtcccagatttttgctcattaacagaaaagaagaggagaatgctaagcagatcctccagcggttgtggggcacccaggatgtatcccaagacatccaggagatgaaagatgagagtgcaaggatgtcacaagaaaagcaagtcaccgtgctagagctctttagagtgtccagctaccgacagcccatcatcatttccattgtgctccagctctctcagcagctctctgggatcaatgctgtgttctattactcaacaggaatcttcaaggatgcaggtgttcaagagcccatctatgccaccatcggcgcgggtgtggttaatactatcttcactgtagtttctctatttctggtggaaagggcaggaagaaggactctgcatatgataggccttggagggatggctttttgttccacgctcatgactgtttctttgttattaaaggataactataatgggatgagctttgtctgtattggggctatcttggtctttgtagccttctttgaaattggaccaggccccattccctggtttattgtggccgaactcttcagccagggcccccgcccagctgcgatggcagtggccggctgctccaactggacctccaacttcctagtcggattgctcttcccctccgctgctcactatttaggagcctacgtttttattatcttcaccggcttcctcattaccttcttggcttttaccttcttcaaagtccctgagacccgtggcaggacttttgaggatatcacacgggcctttgaagggcaggcacacggtgcagatagatctggaaaggacggcgtcatggagatgaacagcatcgagcctgctaaggagaccaccaccaatgtctaagtcgtgcctccttccacctccctcccggcatgggaaagccacctctccctcaacaagggagagacctcatcaggatgaacccaggacgcttctgaatgctgctacttaattcctttctcatcccacgcactccatgagcaccccaaggctgcggtttgttggatcttcaatggctttttaaattttatttcctggacatcctcttctgcttaggagagaccgagtgaacctaccttcatttcaggagggattggccgcttggcacatgacaactttgccagcttttcctcccttgggttctgatattgccgcactaggggatataggagaggaaaagtaaggtgcagttcccccaacctcagacttaccaggaagcagatacatatgagtgtggaagccggagggtgtttatgtaagagcaccttcctcacttccatacagctctacgtggcaaattaacttgagttttatttattttatcctctggtttaattacataatttttttttttttactttaagtttcaggatacatgtgccgaatgtgcaggtttgttacataggtatatatatgccatgatggaaatatttatttttttaagcgtaattttgccaaataataaaaacagaaggaaattgagattagagggaggtgtttaaagagaggttatagagtagaagatttgatgctggagaggttaaggtgcaataagaatttagggagaaatgttgttcattattggagggtaaatgatgtggtgcctgaggtctgtacgttacctcttaacaatttctgtccttcagatggaaactctttaacttctcgtaaaagtcatatacctatataataaagctactgatttccttggagcttttttctttaagataatagtttacatgtagtagtacttgaaatctaggattattaactaatatgggcattgtagttaatgatggttgatgggttctaattttggatggagtccagggaagagaaagtgatttctagaaagcctgttcccctcactggatgaaataactccttcttgtagtagtctcattacttttgaagtaatcccgccacctatctcgtgggagagccatccaaataagaaacctaaaataattggttcttggtagagattcattatttttccactttgttctttaggagattttaggtgttgattttctgttgtattttaactcatacctttaaaggaattccccaaagaatgtttatagcaaacttggaatttgtaacctcagctctgggagaggatttttttctgagcgattattatctaaagtgtgttgttgctttaggctcacggcacgcttgcgtatgtctgttaccatgtcactgtggtcctatgccgaatgccctcaggggacttgaatctttccaataaaccaggtttagacagtatgagtcaatgtgcagtgtagcccacacttgagaggatgaatgtatgtgcactgtcactttgctctgggtggaagtacgttattgttgacttattttctctgtgtttgttcctacagcccctttttcatatgttgctcagtctccctttcccttcttggtgcttacacatctcagaccctttagccaaacccttgtcagtgacagtattttggttcttagttctcactgttccctctgctcctggagcctttgaataaaaatgcacgtagctgaggccggatgcggtggctcacgcctgtaatcccagcactttgggaggcctaggcgggcggtcaggggttcgagaccagtctggccaacatcgtgaaaccctgtctctactaaaaatgcaaaaattagccgggcgtggtggcgggcgcctgtaatcccagctacttgggaagctgaggcgggagaatcatgtgaacccgggacgcaggggttgcagtgagcggagatcgcatcattgcactctagcctgggccacagggcgagactccgtctcaaaaaaaaaaaaatgcacatagctatcgagtgtgctttagcttgaaaaggtgaccttgcaacttcatgtcaactttctggctcctcaaacagtaggttggcagtaaggcagggtcccatttctcactgagaagattgtgaatatttccatatggattttctattgttactctggttctttgttttaaaataaaaattctgaatgtacacg

SEQ ID NO: 89 - protein, 496 aa, Homo sapiens
MGTQKVTPALIFAITVATIGSFQFGYNTGVINAPEKIIKEFINKTLTDKGNAPPSEVLLTSLWSLSVAIFSVGGMIGSFSVGLFVNRFGRRNSMLIVNLLAVTGGCFMGLCKVAKSVEMLILGRLVIGLFCGLCTGFVPMYIGEISPTALRGAFGTLNQLGIVVGILVAQIFGLEFILGSEELWPLLLGFTILPAILQSAALPFCPESPRFLLINRKEEENAKQILQRLWGTQDVSQDIQEMKDESARMSQEKQVTVLELFRVSSYRQPIIISIVLQLSQQLSGINAVFYYSTGIFKDAGVQEPIYATIGAGVVNTIFTVVSLFLVERAGRRTLHMIGLGGMAFCSTLMTVSLLLKDNYNGMSFVCIGAILVFVAFFEIGPGPIPWFIVAELFSQGPRPAAMAVAGCSNWTSNFLVGLLFPSAAHYLGAYVFIIFTGFLITFLAFTFFKVPETRGRTFEDITRAFEGQAHGADRSGKDGVMEMNSIEPAKETTTNV

SEQ ID NO: 90 - DNA, 3285 bp, Homo sapiens
  CDS (112)..(969)
ctagaattcagcggccgctgaattctagacccggatgaagagtaacgccattaccgcccgagccgccgagagccttagccgacggaaactggacactggaccggcagcgccatgagactcctcccccgcttgctgctgcttctcttactcgtgttccctgccactgtcttgttccgaggcggccccagaggctcgttagcagtggcacaagatcttacagaggatgaagaaacagtagaagattccataattgaggatgaagatgatgaagccgaggtagaagaagatgaacccacagatttggtagaagataaagaggaagaagatgtgtctggtgaacctgaagcttcaccgagtgcagatacaactatactgtttgtaaaaggagaagattttccagcaaataacattgtgaagttcctggtaggctttaccaacaagggtacagaagattttattgttgaatccttagatgcctcattccgttatcctcaggaccaccagttttatatccagaatttcacagctcttcctctgaacactgtagtgccaccccagagacaggcaacttttgagtactctttcattcctgcagagcccatgggcggacgaccatttggtttggtcatcaatctgaactacaaagatttgaacggcaatgtattccaagatgcagtcttcaatcaaacagttacagttattgaaagagaggatgggttagatggagaaacaatctttatgtatatgttccttgctggtcttgggcttctggttattgttggccttcatcaactcctagaatctagaaagcgtaagagacccatacagaaagtagaaatgggtacatcaagtcagaatgatgttgacatgagttggattcctcaggaaacattgaatcaaatcaataaagcttcaccaagaaggttgcccaggaaacgggcacagaagagatcagtgggatctgatgagtaaatgttcctttgtgcaacaattcggtctttacttaacctgccctaatatttttcggcctgatgggaattagtgcagagaagccagtcaccatagaaggcaactcctacttgtgtgtggactgagcaatcagagtctgtggcgataatattgctgaaaatgcactgcattcatttttctaaagtaacaaatttggtttttttttaaaccattaaaatctatgtgtgtgcgtgtgtatgtatgtgagcagttggtcttaccagaatcattgttgaactacctgaaacaagtctttagaatactaaatataatgctgttgtctcttcctttttgacattttctgattttttcccccaaaactcagttaatatttacccactatgattattgatgtcctgccttgaacagttttaaagaaaacaatttttggaatagctcaaatttcaattgatggcacaaatcagcattttgttgttgttactgtattacaattagtattctaaaggcagaagcagaagtagctgctttttagcaatagaattgtttcagtattttgctgctgtttaatgcgcatcttcagaaaacttcccagtggcttcaaggaatttggggatctctctggcaacaaattgtgaaacatgaaatttctgctgactttaatatatgaaacctaatcctacccccttttttaacaaaaagaaactagtacatttgtgaaaattgtgttgtgttgtccattgttgctctagttctgacccagaggtagctctggagtgattttagacctactcactcagttgtgtgtaggtttttttgttttgttttgagagagaatttttctctccttaatagaagcatcctttttaaagagaagttgccttggtccacacactaagcagaaaaccaagttatcaggacagagatatttcccagttactcctaatcaatgaagaaagtgagttggatatttttaaagcagttaactaattttttcttacctaatcttttgggagttttgcttgttgatataacctttttagttaacctgaaagattccaaaaattgttcttaagtgcttgagactggaaccaaaattaaattgtacttcataaaatcctcttatagagttactcttgccctagattgtaaattaagtttggcattattgtcagactggatggagggtgaagtaaaatagtatgaacaattaagaggctctccccctcttgtctttaagccatattctcctacatgtattttataagaaaatgttaagtcaaattttagtggctctttaattcctgacctcttcattctccttttcagtataacctcccctatgctcatgcccacacagacaaaaaaacaaaacgaaatacacacagaaaaaagtctttccaaactgtttaagtatttaaacatctgagccaaagcagatagaagttattgtataattgttaatcactttgcaaataggggctatcaaattacctatattggcattgctggattataaactctatatctgtaatataaagtgtttgagtttttaattgggctgttatgatcagtaattgattttgagaaagctctatgagctctaagtaactgcatggttttttgtttaatgtaatataggagacccttcacattcccaaggaatatattccaaaacatttttgtgaatatctaagtttgtgaaactactagggcatgatacagtaaggtgtaattacagaatttacgaaatgtaaatggcctctacagagttttatggaatacctggtactaacgtaggcagctgcaaaaccacactgagttacagctgtcagccctcctcattcctaaataacttgccttacatatcagccctcccacttctgaagttcaaattagtgcctcggaaatgtagaatttattatttgtcattttttttttttagcatagattgagaacagttgaactcttaaatcctcagatgccaggggtctgctctagcatcagtaagtatttagcagaaactaactccgtaatgaatggaattcaattccacacatggtttgttcaagcacacttaataagtagcctattttttaaatgtctttttaaaatgtaaatatttggatgaagtttttctttgttttgatatattcatttgctacaccaactatgttttcagaattcatcttttgaacaacttggtttcagaatatgtaaaatgactttaaggatcttgtgtatcaaacctatccccggatgtgtgagaataatgtgttcataaagcatggatctcgtaaaaaaaaaaaaaaaaaaaaa

SEQ ID NO: 91 - protein, 286 aa, Homo sapiens
MRLLPRLLLLLLLVFPATVLFRGGPRGSLAVAQDLTEDEETVEDSIIEDEDDEAEVEEDEPTDLVEDKEEEDVSGEPEASPSADTTILFVKGEDFPANNIVKFLVGFTNKGTEDFIVESLDASFRYPQDHQFYIQNFTALPLNTVVPPQRQATFEYSFIPAEPMGGRPFGLVINLNYKDLNGNVFQDAVFNQTVTVIEREDGLDGETIFMYMFLAGLGLLVIVGLHQLLESRKRKRPIQKVEMGTSSQNDVDMSWIPQETLNQINKASPRRLPRKRAQKRSVGSDE

SEQ ID NO: 92 - DNA, 2015 bp, Homo sapiens
  CDS (249)..(1349)
tcgctgcgaaggacatttgggctgtgtgtgcgacgcgggtcggaggggcagtcgggggaaccgcgaagaagccgaggagcccggagccccgcgtgacgctcctctctcagtccaaaagcggcttttggttcggcgcagagagacccgggggtctagcttttcctcgaaaagcgccgccctgcccttggccccgagaacagacaaagagcaccgcagggccgatcacgctgggggcgctgaggccggccatggtcatggaagtgggcaccctggacgctggaggcctgcgggcgctgctgggggagcgagcggcgcaatgcctgctgctggactgccgctccttcttcgctttcaacgccggccacatcgccggctctgtcaacgtgcgcttcagcaccatcgtgcggcgccgggccaagggcgccatgggcctggagcacatcgtgcccaacgccgagctccgcggccgcctgctggccggcgcctaccacgccgtggtgttgctggacgagcgcagcgccgccctggacggcgccaagcgcgacggcaccctggccctggcggccggcgcgctctgccgcgaggcgcgcgccgcgcaagtcttcttcctcaaaggaggatacgaagcgttttcggcttcctgcccggagctgtgcagcaaacagtcgacccccatggggctcagccttcccctgagtactagcgtccctgacagcgcggaatctgggtgcagttcctgcagtaccccactctacgatcagggtggcccggtggaaatcctgccctttctgtacctgggcagtgcgtatcacgcttcccgcaaggacatgctggatgccttgggcataactgccttgatcaacgtctcagccaattgtcccaaccattttgagggtcactaccagtacaagagcatccctgtggaggacaaccacaaggcagacatcagctcctggttcaacgaggccattgacttcatagactccatcaagaatgctggaggaagggtgtttgtccactgccaggcaggcatttcccggtcagccaccatctgccttgcttaccttatgaggactaatcgagtcaagctggacgaggcctttgagtttgtgaagcagaggcgaagcatcatctctcccaacttcagcttcatgggccagctgctgcagtttgagtcccaggtgctggctccgcactgttcggcagaggctgggagccccgccatggctgtgctcgaccgaggcacctccaccaccaccgtgttcaacttccccgtctccatccctgtccactccacgaacagtgcgctgagctaccttcagagccccattacgacctctcccagctgctgaaaggccacgggaggtgaggctcttcacatcccattgggactccatgctccttgagaggagaaatgcaataactctgggaggggctcgagagggctggtccttatttatttaacttcacccgagttcctctgggtttctaagcagttatggtgatgacttagcgtcaagacatttgctgaactcagcacattcgggaccaatatatagtgggtacatcaagtccatctgacaaaatggggcagaagagaaaggactcagtgtgtgatccggtttctttttgctcgcccctgttttttgtagaatctcttcatgcttgacatacctaccagtattattcccgacgacacatatacatatgagaatataccttatttatttttgtgtaggtgtctgccttcacaaatgtcattgtctactcctagaagaaccaaatacctcaatttttgtttttgagtactgtactatcctgtaaatatatcttaagcaggtttgttttcagcactgatggaaaataccagtgttgggtttttttttagttgccaacagttgtatgtttgctgattatttatgacctgaaataatatatttcttcttctaagaagacattttgttacataaggatgacttttttatacaatggaataaattatggcatttctattg

SEQ ID NO: 93 - protein, 367 aa, Homo sapiens
MVMEVGTLDAGGLRALLGERAAQCLLLDCRSFFAFNAGHIAGSVNVRFSTIVRRRAKGAMGLEHIVPNAELRGRLLAGAYHAVVLLDERSAALDGAKRDGTLALAAGALCREARAAQVFFLKGGYEAFSASCPELCSKQSTPMGLSLPLSTSVPDSAESGCSSCSTPLYDQGGPVEILPFLYLGSAYHASRKDMLDALGITALINVSANCPNHFEGHYQYKSIPVEDNHKADISSWFNEAIDFIDSIKNAGGRVFVHCQAGISRSATICLAYLMRTNRVKLDEAFEFVKQRRSIISPNFSFMGQLLQFESQVLAPHCSAEAGSPAMAVLDRGTSTTTVFNFPVSIPVHSTNSALSYLQSPITTSPSC

SEQ ID NO: 94 - DNA, 5469 bp, Homo sapiens
  CDS (292)..(3801)
aaggacagaggacgagattttgaacgacaaagagaaaagagagacaagccaaggtctacttccccagcaggacagcatcattctcctatatcttctagacatcactcatcttcctcacaatcaggatcatctattcaaagacattctccttctcctcgtcgaaaaagaactccttcaccatcttatcagcggacactaactccacctttacgacgctctgcctctccttatccttcacattctttgtcgtctccccagagaaagcagagtcctccaagacatcgctctccaatgcgagagaaagggagacatgatcatgaacgaacttcacagtctcatgatcgacgccacgaaaggagggaagatactaggggcaaacgagacagagaaaaggactcaagagaagaacgagaatatgaacaggatcagagctcttctagagaccacagagatgacagagaacctcgagatggtcgggatcggagagatgccagagatactagggaccgaagggaactaagagactccagagacatgcgggactcaagggagatgagagattatagcagagataccaaagagagccgtgatcccagagattctcggtccactcgtgatgcccatgactacagggaccgtgaaggtcgagatactcatcgaaaggaggatacatatccagaagaatcccggagttatggccgaaaccatttgagagaagaaagttctcgtacggaaataaggaatgagtccagaaatgagtctcgaagtgaaattagaaatgaccgaatgggccgaagtagggggagggttcctgagttacctgaaaagggaagtcgaggctcaagaggttctcaaattgatagtcacagtagtaatagcaactatcatgacagctgggaaactcgaagtagctatcctgaaagagatagatatcctgaaagagacaacagagatcaagcaagggattcttcctttgagagaagacatggagagcgagaccgtcgtgacaacagagagagagatcaaagaccaagctcaccaattcgacatcagggaaggaatgacgagcttgagcgtgatgaaagaagagaggaacgaagagtagacagagtggatgataggagagatgaaagggctagagagagagatcgggaacgagaacgagacagggagcgggagagagagagggaacgtgaacgggatcgggaaagagaaaaagagagagaactagaaagagagcgtgctagggaacgggagagagaaagagaaaaagagagagatcgtgaaagggatagagaccgagaccacgatcgagagcgggaaagagagagggaacgagacagggaaaaagaacgggaacgagaaagagaagagagagagagggagagagagcgagaacgggagagagagcgagagcgagaacgggaacgagaaagagcgagagaaagggataaagaacgagaacgccaaagggattgggaagacaaagacaaaggacgagatgaccgcagagaaaagcgagaagagatccgagaagataggaatccaagagatggacatgatgaaagaaaatcaaagaagcgctatagaaatgaagggagtcccagccctagacagtccccgaagcgccggcgtgaacattctccggacagtgatgcctacaacagtggagatgataaaaatgaaaaacacagactcttgagccaagttgtacgacctcaagaatctcgttctcttagtccctcgcacctcacagaagacagacagggtagatggaaagaggaggatcgtaaaccagaaaggaaagagagttcaaggcgctacgaagaacaggaactcaaggagaaagtttcttctgtagataaacagagagaacagacagaaatcctggaaagctcaagaatgcgtgcacaggacattataggacaccaccagtctgaagatcgagagacatctgatcgagctcatgatgaaaacaagaagaaagcaaaaattcaaaagaaaccaattaagaaaaagaaagaggatgatgttggaatagagaggggtaacatagagacaacatctgaagatggtcaagtattttcaccaaaaaaaggacagaaaaagaaaagcattgaaaaaaaacgtaaaaaatccaaaggtgattctgatatttctgatgaagaagcagcccagcaaagtaagaagaaaagaggcccacggactccccctataacaactaaagaggaattggttgaaatgtgcaatggtaagaatggtattctagaggactcccagaaaaaagaagatacagcattcagtgactggtctgatgaggatgtccctgaccgtacagaggtgacagaagcagagcatactgccaccgccacgactcctggtagtaccccttctcctctatcttctcttcttcctcctccaccgcctgtggctactgccactgctacaactgtgcctgcaactcttgctgccactactgctgctgccgccacctctttcagcacatctgccatcactatttccacctctgccacccccaccaataccaccaataatacttttgccaatgaagactcacacagaaaatgccacagaacacgagtagaaaaagtagagacgcctcacgtgactatagaagatgcacagcatcgcaagcctatggatcaaaagaggagcagcagcctcgggagcaatcggagtaaccgtagtcatacgtctggtcgtcttcgctccccatccaatgattcagcccatcgaagtggagatgaccaaagtggtcgaaagagagtactgcacagtggctcaagagatagagaaaaaacaaaaagcctggaaatcacaggagagagaaaatctaggattgatcagttaaagcgtggagaacccagtcgaagtacttcttcagatcgccaggattcaagaagccatagttcaagaagaagttctccagagtcagatcgacaggtccattcaagatctgggtcatttgatagcagagacaggcttcaagaacgagatcgatatgaacacgacagagagcgcgagagagagaggagagatacgaggcagagagaatgggaccgagatgctgataaagattggccacgcaacagggatcgagatagattgcgagaacgagaacgagagagagaacgagacaaaaggagagacttggatagggaaagagagagactaatttctgattctgttgaaagggacagggacagagacagagacagaacttttgagagttctcaaatagagtctgtgaaacgctgtgaagcaaaactggaaggtgaacatgaaagggatctagaaagcacttcccgagactctctagccttggataaagagagaatggataaagatctgggatctgtgcagggatttgaagatacaaataaatccgagagaactgagagtctggaagcaggagatgacgagtccaagttagatgatgcacattcattaggctctggtgctggagaaggatacgagccaatcagtgatgacgaactagatgaaattctggcaggtgatgcagaaaagagggaggaccaacaggatgaggagaagatgccagatcccttagatgtgatagatgtggattggtctggtcttatgccaaagcatccaaaagaaccacgagagcctggggctgcactcttaaaattcacacctggagctgttatgctaagagttgggatttctaaaaagttggcaggttctgaactctttgccaaagtcaaagaaacatgtcagagacttttagaaaaacccaaaggtagtttcattttactttaactatataatgtctgttaaccatttaagatgccatctgaaggggattctgatctgttcttatgtagcacttaacactgtgtagaaactattttttgagaaatcattttataatcattatttaaccctcatggtcaaagtttctctttaaaatttattttgagaagaagagttatcccacagaaaagttgggaaaagagtacaatgacctttttgtatgaaaattacttattaacaggccaggcgtggtgttgcatgtctgtagtcacagctactcagggaggttgaggcagcaggattgctggagcccaggaaattgaggctgcagtgagccatgattgagccaccacactccaacctaggtgacagagcaagaccctgtctcaaaaaaaaaaaaacaaattaaccaataagttctaatatcaaagtgctcagtggtttgcccttggctaaatgaagcagagccaggaaaaacagactacatatttttcatgtctaaagaaattgggtattttggcagccctttcccctagacatctacccaaatgcaggtgtgtaggttgagtctttaacaaagtgattaagagcttggtctgtaaggccggatgatctggatttcagtaggcacaccacttactggctattacttaatctgtgtgttagtgtcatcatctgtaagtcaggaataatcataccaccaacttcctatggtaattaggagcaaatgagttattacaggcaaaacacttagaacagttcctggcatatagtaatacccaataaatattaactgctactttgaaaatatcctatcacgctgatttttgacctcactgcagcaattttcagttattccagattatctagcttatggattctggtggtaggggttgtttggttttggttttcactgtctctgtctcatctagtacctaccttagtttattttgcaacttactaatactttattaatggggagggacgagtagatggtaaaaagaaggaaaaggaggtaaaaggtgaaaggaacaacattaattaacaattttacgtcatgtccctggacataaaagtttagttagtattaaatttttcactaatacaaaataaaaaaatattgttttatgagttttatgaattcatgcccttcctttactctattagcataagcagtaaatttttttattttaatatagcccaataaacctagagtatacatgtacaaaatacatataattgttaacgtgtattaaccgaaaaatgacccaagacttagttcttgccctactgtatctgccttgtttggttggttctgtgaccttaagcaaataactcctgtgagcctcaattttatttgtaaagtgatggaataaaacccctaaaatcttacccacctctaaagatatttgtttctgtgaccttttgctagtagcatttcaagttaaaatctggtttgattttgctacccatgaaatacagttcggcccttacttattgatgacttaacctaaacagtgaaaatatgcactgtaaagggtggggtgatgtggcttaacaatcagacttcttctatttttgctgctatggtggttgtattagagaactgatgtattatcttgaataaagactttgtcttgtttactgccctaaaaaaaaaaaaaaaaaaaa

SEQ ID NO: 95 - protein, 1170 aa, Homo sapiens
MREKGRHDHERTSQSHDRRHERREDTRGKRDREKDSREEREYEQDQSSSRDHRDDREPRDGRDRRDARDTRDRRELRDSRDMRDSREMRDYSRDTKESRDPRDSRSTRDAHDYRDREGRDTHRKEDTYPEESRSYGRNHLREESSRTEIRNESRNESRSEIRNDRMGRSRGRVPELPEKGSRGSRGSQIDSHSSNSNYHDSWETRSSYPERDRYPERDNRDQARDSSFERRHGERDRRDNRERDQRPSSPIRHQGRNDELERDERREERRVDRVDDRRDERARERDRERERDRERERERERERDREREKERELERERAREREREREKERDRERDRDRDHDRERERERERDREKEREREREERERERERERERERERERERERARERDKERERQRDWEDKDKGRDDRREKREEIREDRNPRDGHDERKSKKRYRNEGSPSPRQSPKRRREHSPDSDAYNSGDDKNEKHRLLSQVVRPQESRSLSPSHLTEDRQGRWKEEDRKPERKESSRRYEEQELKEKVSSVDKQREQTEILESSRMRAQDIIGHHQSEDRETSDRAHDENKKKAKIQKKPIKKKKEDDVGIERGNIETTSEDGQVFSPKKGQKKKSIEKKRKKSKGDSDISDEEAAQQSKKKRGPRTPPITTKEELVEMCNGKNGILEDSQKKEDTAFSDWSDEDVPDRTEVTEAEHTATATTPGSTPSPLSSLLPPPPPVATATATTVPATLAATTAAAATSFSTSAITISTSATPTNTTNNTFANEDSHRKCHRTRVEKVETPHVTIEDAQHRKPMDQKRSSSLGSNRSNRSHTSGRLRSPSNDSAHRSGDDQSGRKRVLHSGSRDREKTKSLEITGERKSRIDQLKRGEPSRSTSSDRQDSRSHSSRRSSPESDRQVHSRSGSFDSRDRLQERDRYEHDRERERERRDTRQREWDRDADKDWPRNRDRDRLRERERERERDKRRDLDRERERLISDSVERDRDRDRDRTFESSQIESVKRCEAKLEGEHERDLESTSRDSLALDKERMDKDLGSVQGFEDTNKSERTESLEAGDDESKLDDAHSLGSGAGEGYEPISDDELDEILAGDAEKREDQQDEEKMPDPLDVIDVDWSGLMPKHPKEPREPGAALLKFTPGAVMLRVGISKKLAGSELFAKVKETCQRLLEKPKGSFILL

SEQ ID NO: 96 - DNA, 2486 bp, Homo sapiens
  CDS (194)..(583)
ggcatcaccggccagccgggtggagtgagcggcgctgggctcgggctccggctccgcgggcggaagaggcggcggcggcggcagaagcggcggcggcggcggcggcgggagccgaggaggaggttccggacgctgcttaggaaccggggactcaggagtgcccgcgccctgagcgctcagctccagaggcgtcatggctgagtacgggaccctcctgcaagacctgaccaacaacatcacccttgaagatctagaacagctcaagtcggcctgcaaggaagacatccccagcgaaaagagtgaggagatcactactggcagtgcctggtttagcttcctggagagccacaacaagctggacaaagacaacctctcctacattgagcacatctttgagatctcccgccgtcctgacctactcactatggtggttgactacagaacccgtgtgctgaaaatctctgaggaggatgagctggacaccaagctaacccgtatccccagtgccaagaagtacaaagacattatccggcagccctctgaggaagagatcatcaaattggctcccccaccgaagaaggcctgagcaagggggaggaagaggaggaaggttggaccttcatcagaccactcccttcccccatcctccaggagagggggcaagggcaacccaccatctacccacttactaacctggtcctaacccccttactgtgcgcgtgtgtgtgcgtgtgcgcacgctctggctgtttgtctatatgtctagctcatctagttcctcttcttaaggggatgggggtcaggggctaggggagggggctgagtttccccactttaggaggaggtgggggctatttctatgcaaatagaaatcagcacattcctcctacttccctttcctccactccccccatatctttaaagtgtggaagcagaaaggacctgcattttcctacattgaggagctgacataggggtaaggtatgggagaggtaggtggatccagggaaaagcagtggggacggaaggcaaagagaccactcaacccccacctggaaggggcaaagaaaagccagagttccatgtttgtactcctgtgctggactgtttcctgagtaccagcaggtccctttttgtctctcatgggcctagcataggtatgagccagggatcctttcctggtccctaagatcaaaccccatggagcagccagcgttagatgcccccacccacctgtactctggagagactgtgctgggaacatgtaccactgagcctgagatggggatgagggcagagagaggggagccccctcttccactcagttgttcctactcagactgttgcactctaaacctagggaggttgaagaatgagacccttaggttttaacacgaatcctgacaccaccatctatagggtcccaacttggttattgtaggcaaccttccctctctccttggtgaagaacatcccaagccagaaagaagttaactacagtgttttcctttgcaccgatccccaccccaattcaatcccggaagggacttacttaggaaacccttctttactagatatcctggccccctgggcttgtgaacacctcctagccacatcactacagtacagtgagtgaccccagcctcctgcctaccccaagatgcccctccccaccctgaccgtgctaactgtgtgtacatatatattctacatatatgtatattaaaactgcactgccatgtctgcccttttttgtggtgtctagcattaacttattgtctaggccagagcgggggtgggaggggaatgccacagtgaagggagtggcagaatcaaattgctacatagtccaaacaaaaaagaaggctttttcaaaaaacattaaattcacatgcagtctcagagactatttagacaaagttcaagttaggagcttttaggatgtgggagtaaaactttaatgggaggggagggctggctgctggaagaaggaagaagccagactggttagacagtactcttaactcctagcccagcctagcgtgccctgcccctctggccactgctgcagacacctgccttaacacacacacctctaggactccacagttttgccttaaaggaccttcccaagtctccctttccctgtctggcttctcccttaagaagagagagatacttgtagaattgggtggggggaatgagcatgaactgtccttccatttgggatatgttacgttagagtgagagagagaataaggagcctttcttatggaagaaatgggagaagagagacagggttcttttcagcagagtctagtagtttctctgtaaggcaaaataatctaaaaagactaacctgcccacccactccttatattgctgtgagattgcccctatcttgtgctcttctgtctgcagtgtgcacggccttgttctaacccggaataaaggtgattgattgtattgcaaaaaaaaaaaaaaaa

SEQ ID NO: 97 - protein, 130 aa, Homo sapiens
MAEYGTLLQDLTNNITLEDLEQLKSACKEDIPSEKSEEITTGSAWFSFLESHNKLDKDNLSYIEHIFEISRRPDLLTMVVDYRTRVLKISEEDELDTKLTRIPSAKKYKDIIRQPSEEEIIKLAPPPKKA

SEQ ID NO: 98 - DNA, 3198 bp, Homo sapiens
  CDS (213)..(2630)
ctgccactgccacctcgcggatcaggagccagcgttgttcgcccgacgcctcgctgccggtgggaggaagcgagagggaagccgcttgggctcttgtcgccgctgctcgcccaccgcctggaagagccgagccccggccagtcggtcgcttgccaccgctcgtagccgttacccgcgggccgccacagccgccggcgggagaggcgcgcgccatggcttctggagccgattcaaaaggtgatgacctatcaacagccattctcaaacagaagaaccgtcccaatcggttaattgttgatgaagccatcaatgaggacaacagtgtggtgtccttgtcccagcccaagatggatgaattgcagttgttccgaggtgacacagtgttgctgaaaggaaagaagagacgagaagctgtttgcatcgtcctttctgatgatacttgttctgatgagaagattcggatgaatagagttgttcggaataaccttcgtgtacgcctaggggatgtcatcagcatccagccatgccctgatgtgaagtacggcaaacgtatccatgtgctgcccattgatgacacagtggaaggcattactggtaatctcttcgaggtataccttaagccgtacttcctggaagcgtatcgacccatccggaaaggagacatttttcttgtccgtggtgggatgcgtgctgtggagttcaaagtggtggaaacagatcctagcccttattgcattgttgctccagacacagtgatccactgcgaaggggagcctatcaaacgagaggatgaggaagagtccttgaatgaagtagggtatgatgacattggtggctgcaggaagcagctagctcagatcaaagagatggtggaactgcccctgagacatcctgccctctttaaggcaattggtgtgaagcctcctagaggaatcctgctttacggacctcctggaacaggaaagaccctgattgctcgagctgtagcaaatgagactggagccttcttcttcttgatcaatggtcctgagatcatgagcaaattggctggtgagtctgagagcaaccttcgtaaagcctttgaggaggctgagaagaatgctcctgccatcatcttcattgatgagctagatgccatcgctcccaaaagagagaaaactcatggcgaggtggagcggcgcattgtatcacagttgttgaccctcatggatggcctaaagcagagggcacatgtgattgttatggcagcaaccaacagacccaacagcattgacccagctctacggcgatttggtcgctttgacagggaggtagatattggaattcctgatgctacaggacgcttagagattcttcagatccataccaagaacatgaagctggcagatgatgtggacctggaacaggtagccaatgagactcacgggcatgtgggtgctgacttagcagccctgtgctcagaggctgctctgcaagccatccgcaagaagatggatctcattgacctagaggatgagaccattgatgccgaggtcatgaactctctagcagttactatggatgacttccggtgggccttgagccagagtaacccatcagcactgcgggaaaccgtggtagaggtgccacaggtaacctgggaagacatcgggggcctagaggatgtcaaacgtgagctacaggagctggtccagtatcctgtggagcacccagacaaattcctgaagtttggcatgacaccttccaagggagttctgttctatggacctcctggctgtgggaaaactttgttggccaaagccattgctaatgaatgccaggccaacttcatctccatcaagggtcctgagctgctcaccatgtggtttggggagtctgaggccaatgtcagagaaatctttgacaaggcccgccaagctgccccctgtgtgctattctttgatgagctggattcgattgccaaggctcgtggaggtaacattggagatggtggtggggctgctgaccgagtcatcaaccagatcctgacagaaatggatggcatgtccacaaaaaaaaatgtgttcatcattggcgctaccaaccggcctgacatcattgatcctgccatcctcagacctggccgtcttgatcagctcatctacatcccacttcctgatgagaagtcccgtgttgccatcctcaaggctaacctgcgcaagtccccagttgccaaggatgtggacttggagttcctggctaaaatgactaatggcttctctggagctgacctgacagagatttgccagcgtgcttgcaagctggccatccgtgaatccatcgagagtgagattaggcgagaacgagagaggcagacaaacccatcagccatggaggtagaagaggatgatccagtgcctgagatccgtcgagatcactttgaagaagccatgcgctttgcgcgccgttctgtcagtgacaatgacattcggaagtatgagatgtttgcccagacccttcagcagagtcggggctttggcagcttcagattcccttcagggaaccagggtggagctggccccagtcagggcagtggaggcggcacaggtggcagtgtatacacagaagacaatgatgatgacctgtatggctaagtggtggtggccagcgtgcagtgagctggcctgcctggaccttgttccctgggggtggggcgcttgcccaggagagggaccaggggtgcgcccacagcctgctccattctccagtctgaacagttcagctacagtctgactctggacagggggtttctgttgcaaaaatacaaaacaaaagcgataaaataaaagcgattttcatttggtaggcggagagtgaattaccaacagggaattgggccttgggcctatgccatttctgttgtagtttggggcagtgcaggggacctgtgtggggtgtgaaccaaggcactactgccacctgccacagtaaagcatctgcacttgactcaatgctgcccgagccctcccttccccctatccaacctgggtaggtgggtaggggccacagttgctggatgtttatatagagagtaggttgatttattttacatgcttttgagttaatgttggaaaactaatcacaagcagtttctaaaccaaaaaatgacatgttgtaaaaggacaataaacgttgggtcaaaatggaaaaaaaaaaaaa

SEQ ID NO: 99 - protein, 806 aa, Homo sapiens
MASGADSKGDDLSTAILKQKNRPNRLIVDEAINEDNSVVSLSQPKMDELQLFRGDTVLLKGKKRREAVCIVLSDDTCSDEKIRMNRVVRNNLRVRLGDVISIQPCPDVKYGKRIHVLPIDDTVEGITGNLFEVYLKPYFLEAYRPIRKGDIFLVRGGMRAVEFKVVETDPSPYCIVAPDTVIHCEGEPIKREDEEESLNEVGYDDIGGCRKQLAQIKEMVELPLRHPALFKAIGVKPPRGILLYGPPGTGKTLIARAVANETGAFFFLINGPEIMSKLAGESESNLRKAFEEAEKNAPAIIFIDELDAIAPKREKTHGEVERRIVSQLLTLMDGLKQRAHVIVMAATNRPNSIDPALRRFGRFDREVDIGIPDATGRLEILQIHTKNMKLADDVDLEQVANETHGHVGADLAALCSEAALQAIRKKMDLIDLEDETIDAEVMNSLAVTMDDFRWALSQSNPSALRETVVEVPQVTWEDIGGLEDVKRELQELVQYPVEHPDKFLKFGMTPSKGVLFYGPPGCGKTLLAKAIANECQANFISIKGPELLTMWFGESEANVREIFDKARQAAPCVLFFDELDSIAKARGGNIGDGGGAADRVINQILTEMDGMSTKKNVFIIGATNRPDIIDPAILRPGRLDQLIYIPLPDEKSRVAILKANLRKSPVAKDVDLEFLAKMTNGFSGADLTEICQRACKLAIRESIESEIRRERERQTNPSAMEVEEDDPVPEIRRDHFEEAMRFARRSVSDNDIRKYEMFAQTLQQSRGFGSFRFPSGNQGGAGPSQGSGGGTGGSVYTEDNDDDLYG

SEQ ID NO: 100 - DNA, 1288 bp, Homo sapiens
  CDS (81)..(1208)
acaccagccctcagtcactgggagaagaacctctcataccctcggtgctccagtccccagctcactcagccacacacaccatgtgtgaagaggagaccaccgcgctcgtgtgtgacaatggctctggcctgtgcaaggcaggcttcgcaggagatgatgccccccgggctgtcttcccctccattgtgggccgccctcgccaccagggtgtgatggtgggaatgggccagaaagacagctatgtgggggatgaggctcagagcaagcgagggatcctaactctcaaataccccattgaacacggcatcatcaccaactgggatgacatggagaagatctggcaccactccttctacaatgagctgcgtgtagcacctgaagagcaccccaccctgctcacagaggctcccctaaatcccaaggccaacagggaaaagatgacccagatcatgtttgaaaccttcaatgtccctgccatgtacgtcgccattcaagctgtgctctccctctatgcctctggccgcacgacaggcatcgtcctggattcaggtgatggcgtcacccacaatgtccccatctatgaaggctatgccctgccccatgccatcatgcgcctggacttggctggccgtgacctcacggactacctcatgaagatcctcacagagagaggctattcctttgtgaccacagctgagagagaaattgtgcgagacatcaaggagaagctgtgctatgtggccctggattttgagaatgagatggccacagcagcttcctcttcctccctggagaagagctatgagctgccagatgggcaggttatcaccattggcaatgagcgcttccgctgccctgagaccctcttccagccttcctttattggcatggagtccgctggaattcatgagacaacctacaattccatcatgaagtgtgacattgacatccgtaaggacttatatgccaacaatgtcctctctgggggcaccaccatgtaccctggcattgctgacaggatgcagaaggagatcacagccctggcccccagcaccatgaagatcaagattattgctcccccagagcggaagtactcagtctggatcgggggctctatcctggcctctctctccaccttccagcagatgtggatcagcaagcctgagtatgatgaggcagggccctccattgtccacaggaagtgcttctaaagtcagaacaggttctccaaggatcccctcgagactactctgttaccagtcatgaaacattaaaacctacaagcctt

SEQ ID NO: 101 - protein, 376 aa, Homo sapiens
MCEEETTALVCDNGSGLCKAGFAGDDAPRAVFPSIVGRPRHQGVMVGMGQKDSYVGDEAQSKRGILTLKYPIEHGIITNWDDMEKIWHHSFYNELRVAPEEHPTLLTEAPLNPKANREKMTQIMFETFNVPAMYVAIQAVLSLYASGRTTGIVLDSGDGVTHNVPIYEGYALPHAIMRLDLAGRDLTDYLMKILTERGYSFVTTAEREIVRDIKEKLCYVALDFENEMATAASSSSLEKSYELPDGQVITIGNERFRCPETLFQPSFIGMESAGIHETTYNSIMKCDIDIRKDLYANNVLSGGTTMYPGIADRMQKEITALAPSTMKIKIIAPPERKYSVWIGGSILASLSTFQQMWISKPEYDEAGPSIVHRKCF

SEQ ID NO: 102 - DNA, 6861 bp, Homo sapiens
  CDS (89)..(6004)
gcctgggaggtgcgtcagatccgagctcgccatccagtttcctctccactagtccccccagttggagatctgggaccaacaaggcaccatggcgcagaagggccaactcagtgacgatgagaagttcctctttgtggacaaaaacttcatcaacagcccagtggcccaggctgactgggccgccaagagactcgtctgggtcccctcggagaagcagggcttcgaggcagccagcattaaggaggagaagggggatgaggtggttgtggagctggtggagaatggcaagaaggtcacggttgggaaagatgacatccagaagatgaacccacccaagttctccaaggtggaggacatggcggagctgacgtgcctcaacgaagcctccgtgctacacaacctgagggagcggtacttctcagggctaatatatacgtactctggcctcttctgcgtggtggtcaacccctataaacacctgcccatctactcggagaagatcgtcgacatgtacaagggcaagaagaggcacgagatgccgcctcacatctacgccatcgcagacacggcctaccggagcatgcttcaagatcgggaggaccagtccattctatgcacaggcgagtctggagccgggaaaaccgaaaacaccaagaaggtcattcagtacctggccgtggtggcctcctcccacaagggcaagaaagacacaagtatcacgggagagctggaaaagcagcttctacaagcaaacccgattctggaggctttcggcaacgccaaaacagtgaagaacgacaactcctcacgattcggcaaattcatccgcatcaacttcgacgtcacgggttacatcgtgggagccaacattgagacctatctgctagaaaaatcacgggcaattcgccaagccagagacgagaggacattccacatcttttactacatgattgctggagccaaggagaagatgagaagtgacttgcttttggagggcttcaacaactacaccttcctctccaatggctttgtgcccatcccagcagcccaggatgatgagatgttccaggaaaccgtggaggccatggcaatcatgggtttcagcgaggaggagcagctatccatattgaaggtggtatcatcggtcctgcagcttggaaatatcgtcttcaagaaggaaagaaacacagaccaggcgtccatgccagataacacagctgctcagaaagtttgccacctcatgggaattaatgtgacagatttcaccagatccatcctcactcctcgtatcaaggttgggcgagatgtggtacagaaagctcagacaaaagaacaggctgactttgctgtagaggctttggccaaggcaacatatgagcgccttttccgctggatactcacccgcgtgaacaaagccctggacaagacccatcggcaaggggcttccttcctggggatcctggatatagctggatttgagatctttgaggtgaactccttcgagcagctgtgcatcaactacaccaacgagaagctgcagcagctcttcaaccacaccatgttcatcctggagcaggaggagtaccagcgcgagggcatcgagtggaacttcatcgactttgggctggacctacagccctgcatcgagctcatcgagcgaccgaacaaccctccaggtgtgctggccctgctggacgaggaatgctggttccccaaagccacggacaagtctttcgtggagaagctgtgcacggagcagggcagccaccccaagttccagaagcccaagcagctcaaggacaagactgagttctccatcatccattatgctgggaaggtggactataatgcgagtgcctggctgaccaagaatatggacccgctgaatgacaacgtgacttccctgctcaatgcctcctccgacaagtttgtggccgacctgtggaaggacgtggaccgcatcgtgggcctggaccagatggccaagatgacggagagctcgctgcccagcgcctccaagaccaagaagggcatgttccgcacagtggggcagctgtacaaggagcagctgggcaagctgatgaccacgctacgcaacaccacgcccaacttcgtgcgctgcatcatccccaaccacgagaagaggtccggcaagctggatgcgttcctggtgctggagcagctgcggtgcaatggggtgctggaaggcattcgcatctgccggcagggcttccccaaccggatcgtcttccaggagttccgccaacgctacgagatcctggcggcgaatgccatccccaaaggcttcatggacgggaagcaggcctgcattctcatgatcaaagccctggaacttgaccccaacttatacaggatagggcagagcaaaatcttcttccgaactggcgtcctggcccacctagaggaggagcgagatttgaagatcaccgatgtcatcatggccttccaggcgatgtgtcgtggctacttggccagaaaggcttttgccaagaggcagcagcagctgaccgccatgaaggtgattcagaggaactgcgccgcctacctcaagctgcggaactggcagtggtggaggcttttcaccaaagtgaagccactgctgcaggtgacacggcaggaggaggagatgcaggccaaggaggatgaactgcagaagaccaaggagcggcagcagaaggcagagaatgagcttaaggagctggaacagaagcactcgcagctgaccgaggagaagaacctgctacaggaacagctgcaggcagagacagagctgtatgcagaggctgaggagatgcgggtgcggctggcggccaagaagcaggagctggaggagatactgcatgagatggaggcccgcctggaggaggaggaagacaggggccagcagctacaggctgaaaggaagaagatggcccagcagatgctggaccttgaagaacagctggaggaggaggaagctgccaggcagaagctgcaacttgagaaggtcacggctgaggccaagatcaagaaactggaggatgagatcctggtcatggatgatcagaacaataaactatcaaaagaacgaaaactccttgaggagaggattagtgacttaacgacaaatcttgcagaagaggaagaaaaggccaagaatcttaccaagctgaaaaacaagcatgaatctatgatttcagaactggaagtgcggctaaagaaggaagagaagagccgacaggagctggagaagctgaaacggaagctggagggtgatgccagcgacttccacgagcagatcgctgacctccaggcgcagatcgcagagctcaagatgcagctggccaagaaggaggaggagctgcaggcggccctggccaggcttgacgatgaaatcgctcagaagaacaatgccctgaagaagatccgggagctggagggccacatctcagacctccaggaggacctggactcagagcgggccgccaggaacaaggctgaaaagcagaagcgagacctcggcgaggagctggaggccctaaagacagagctggaagacacactggacagcacagccactcagcaggagctcagggccaagagggagcaggaggtgacggtgctgaagaaggccctggatgaagagacgcggtcccatgaggctcaggtccaggagatgaggcagaaacacgcacaggcggtggaggagctcacagagcagcttgagcagttcaagagggccaaggcgaacctagacaagaataagcagacgctggagaaagagaacgcagacctggccggggagctgcgggtcctgggccaggccaagcaggaggtggaacataagaagaagaagctggaggcgcaggtgcaggagctgcagtccaagtgcagcgatggggagcgggcccgggcggagctcaatgacaaagtccacaagctgcagaatgaagttgagagcgtcacagggatgcttaacgaggccgaggggaaggccattaagctggccaaggacgtggcgtccctcagttcccagctccaggacacccaggagctgcttcaagaagaaacccggcagaagctcaacgtgtctacgaagctgcgccagctggaggaggagcggaacagcctgcaagaccagctggacgaggagatggaggccaagcagaacctggagcgccacatctccactctcaacatccagctctccgactcgaagaagaagctgcaggactttgccagcaccgtggaagctctggaagaggggaagaagaggttccagaaggagatcgagaacctcacccagcagtacgaggagaaggcggccgcttatgataaactggaaaagaccaagaacaggcttcagcaggagctggacgacctggttgttgatttggacaaccagcggcaactcgtgtccaacctggaaaagaagcagaggaaatttgatcagttgttagccgaggagaaaaacatctcttccaaatacgcggatgagagggacagagctgaggcagaagccagggagaaggaaaccaaggccctgtccctggctcgggcccttgaagaggccttggaagccaaagaggaactcgagcggaccaacaaaatgctcaaagccgaaatggaagacctggtcagctccaaggatgacgtgggcaagaacgtccatgagctggagaagtccaagcgggccctggagacccagatggaggagatgaagacgcagctggaagagctggaggacgagctgcaagccacggaggacgccaaactgcggctggaagtcaacatgcaggcgctcaagggccagttcgaaagggatctccaagcccgggacgagcagaatgaggagaagaggaggcaactgcagagacagcttcacgagtatgagacggaactggaagacgagcgaaagcaacgtgccctggcagctgcagcaaagaagaagctggaaggggacctgaaagacctggagcttcaggccgactctgccatcaaggggagggaggaagccatcaagcagctacgcaaactgcaggctcagatgaaggactttcaaagagagctggaagatgcccgtgcctccagagatgagatctttgccacagccaaagagaatgagaagaaagccaagagcttggaagcagacctcatgcagctacaagaggacctcgccgccgctgagagggctcgcaaacaagcggacctcgagaaggaggaactggcagaggagctggccagtagcctgtcgggaaggaacgcactccaggacgagaagcgccgcctggaggcccggatcgcccagctggaggaggagctggaggaggagcagggcaacatggaggccatgagcgaccgggtccgcaaagccacacagcaggccgagcagctcagcaacgagctggccacagagcgcagcacggcccagaagaatgagagtgcccggcagcagctcgagcggcagaacaaggagctccggagcaagctccacgagatggagggggccgtcaagtccaagttcaagtccaccatcgcggcgctggaggccaagattgcacagctggaggagcaggtcgagcaggaggccagagagaaacaggcggccaccaagtcgctgaagcagaaagacaagaagctgaaggaaatcttgctgcaggtggaggacgagcgcaagatggccgagcagtacaaggagcaggcagagaaaggcaatgccagggtcaagcagctcaagaggcagctggaggaggcagaggaggagtcccagcgcatcaacgccaaccgcaggaagctgcagcgggagctggatgaggccacggagagcaacgaggccatgggccgcgaggtgaacgcactcaagagcaagctcaggcgaggaaacgagacctctttcgttccttctagaaggtctggaggacgtagagttattgaaaatgcagatggttctgaggaggaaacggacactcgagacgcagacttcaatggaaccaaggccagtgaataagcaactttctacagttttgcaccacggcaagaaaaccaaaaaccaaaacaaacaaacaaaaaaaacccaacaacaacccagaacaaagcaaaacccagcagactgtacttagcattgtctaaatccattctcaaattccaaatatcacagacacccctcacacaaggaatataaaaaccaccaccctccagcctgggcaacgtagtaaaacctcatctatacaagaatttaaaaataagctgggcgtggtggtacacacctgtggtcccagctactagggaggctgagccaggaagaacgctccagcccaggacttcgaggctgcaatgagctataattgcatcattgcactccagcctgggcaacagagaccctgtctcaaccaccaccaccaccaccacccctactacccctgtattcaaggtaaaaattgaagtttgtatgatgtaagagatgagaaaaacccaacaggaaacacagacacatcctccagttctatcaatggattgtgcagacactgagtttttagaaaaacatatccacggtaaccggtccctggcaattctgtttacatgaaatggggagaaagtcaccgaaatgggtgccgccggcccccactcccaattcattccctaacctgcaaacctttccaacttctcacgtcaggcctttgagaattctttccccctctcctggtttccacacctcagacacgcacagttcaccaagtgccttctgtagtcacatgaattgaaaaggagacgctgctcccacggaggggagcaggaatgctgcactgtttacaccctgactgtgcttaaaaacactttcactaataaatggttataaatcac

SEQ ID NO: 103 - protein, 1972 aa, Homo sapiens
MAQKGQLSDDEKFLFVDKNFINSPVAQADWAAKRLVWVPSEKQGFEAASIKEEKGDEVVVELVENGKKVTVGKDDIQKMNPPKFSKVEDMAELTCLNEASVLHNLRERYFSGLIYTYSGLFCVVVNPYKHLPIYSEKIVDMYKGKKRHEMPPHIYAIADTAYRSMLQDREDQSILCTGESGAGKTENTKKVIQYLAVVASSHKGKKDTSITGELEKQLLQANPILEAFGNAKTVKNDNSSRFGKFIRINFDVTGYIVGANIETYLLEKSRAIRQARDERTFHIFYYMIAGAKEKMRSDLLLEGFNNYTFLSNGFVPIPAAQDDEMFQETVEAMAIMGFSEEEQLSILKVVSSVLQLGNIVFKKERNTDQASMPDNTAAQKVCHLMGINVTDFTRSILTPRIKVGRDVVQKAQTKEQADFAVEALAKATYERLFRWILTRVNKALDKTHRQGASFLGILDIAGFEIFEVNSFEQLCINYTNEKLQQLFNHTMFILEQEEYQREGIEWNFIDFGLDLQPCIELIERPNNPPGVLALLDEECWFPKATDKSFVEKLCTEQGSHPKFQKPKQLKDKTEFSIIHYAGKVDYNASAWLTKNMDPLNDNVTSLLNASSDKFVADLWKDVDRIVGLDQMAKMTESSLPSASKTKKGMFRTVGQLYKEQLGKLMTTLRNTTPNFVRCIIPNHEKRSGKLDAFLVLEQLRCNGVLEGIRICRQGFPNRIVFQEFRQRYEILAANAIPKGFMDGKQACILMIKALELDPNLYRIGQSKIFFRTGVLAHLEEERDLKITDVIMAFQAMCRGYLARKAFAKRQQQLTAMKVIQRNCAAYLKLRNWQWWRLFTKVKPLLQVTRQEEEMQAKEDELQKTKERQQKAENELKELEQKHSQLTEEKNLLQEQLQAETELYAEAEEMRVRLAAKKQELEEILHEMEARLEEEEDRGQQLQAERKKMAQQMLDLEEQLEEEEAARQKLQLEKVTAEAKIKKLEDEILVMDDQNNKLSKERKLLEERISDLTTNLAEEEEKAKNLTKLKNKHESMISELEVRLKKEEKSRQELEKLKRKLEGDASDFHEQIADLQAQIAELKMQLAKKEEELQAALARLDDEIAQKNNALKKIRELEGHISDLQEDLDSERAARNKAEKQKRDLGEELEALKTELEDTLDSTATQQELRAKREQEVTVLKKALDEETRSHEAQVQEMRQKHAQAVEELTEQLEQFKRAKANLDKNKQTLEKENADLAGELRVLGQAKQEVEHKKKKLEAQVQELQSKCSDGERARAELNDKVHKLQNEVESVTGMLNEAEGKAIKLAKDVASLSSQLQDTQELLQEETRQKLNVSTKLRQLEEERNSLQDQLDEEMEAKQNLERHISTLNIQLSDSKKKLQDFASTVEALEEGKKRFQKEIENLTQQYEEKAAAYDKLEKTKNRLQQELDDLVVDLDNQRQLVSNLEKKQRKFDQLLAEEKNISSKYADERDRAEAEAREKETKALSLARALEEALEAKEELERTNKMLKAEMEDLVSSKDDVGKNVHELEKSKRALETQMEEMKTQLEELEDELQATEDAKLRLEVNMQALKGQFERDLQARDEQNEEKRRQLQRQLHEYETELEDERKQRALAAAAKKKLEGDLKDLELQADSAIKGREEAIKQLRKLQAQMKDFQRELEDARASRDEIFATAKENEKKAKSLEADLMQLQEDLAAAERARKQADLEKEELAEELASSLSGRNALQDEKRRLEARIAQLEEELEEEQGNMEAMSDRVRKATQQAEQLSNELATERSTAQKNESARQQLERQNKELRSKLHEMEGAVKSKFKSTIAALEAKIAQLEEQVEQEAREKQAATKSLKQKDKKLKEILLQVEDERKMAEQYKEQAEKGNARVKQLKRQLEEAEEESQRINANRRKLQRELDEATESNEAMGREVNALKSKLRRGNETSFVPSRRSGGRRVIENADGSEEETDTRDADFNGTKASE

SEQ ID NO: 104 - DNA, 1128 bp, Homo sapiens
  CDS (69)..(515)
agtccgagtggagagagcgagctgagtggttgtgtggtcgcgtctcggaaaccggtagcgcttgcagcatggctgaccaactgactgaagagcagattgcagaattcaaagaagctttttcactatttgacaaagatggtgatggaactataacaacaaaggaattgggaactgtaatgagatctcttgggcagaatcccacagaagcagagttacaggacatgattaatgaagtagatgctgatggtaatggcacaattgacttccctgaatttctgacaatgatggcaagaaaaatgaaagacacagacagtgaagaagaaattagagaagcattccgtgtgtttgataaggatggcaatggctatattagtgctgcagaacttcgccatgtgatgacaaaccttggagagaagttaacagatgaagaagttgatgaaatgatcagggaagcagatattgatggtgatggtcaagtaaactatgaagagtttgtacaaatgatgacagcaaagtgaagaccttgtacagaatgtgttaaatttcttgtacaaaattgtttatttgccttttctttgtttgtaacttatctgtaaaaggtttctccctactgtcaaaaaaatatgcatgtatagtaattaggacttcattcctccatgttttcttcccttatcttactgtcattgtcctaaaaccttattttagaaaattgatcaagtaacatgttgcatgtggcttactctggatatatctaagcccttctgcacatctaaacttagatggagttggtcaaatgagggaacatctgggttatgccttttttaaagtagttttctttaggaactgtcagcatgttgttgttgaagtgtggagttgtaactctgcgtggactatggacagtcaacaatatgtacttaaaagttgcactattgcaaaacgggtgtattatccaggtactcgtacactatttttttgtactgctggtcctgtaccagaaacattttcttttattgttacttgctttttaaactttgtttagccacttaaaatctgcttatggcacaatttgcctcaaaatccattccaagttgtatatttgttttccaataaaaaaattacaatttaccc

SEQ ID NO: 105 - protein, 149 aa, Homo sapiens [sequence omitted]

SEQ ID NO: 106 - DNA, 1839 bp, Homo sapiens
  CDS (117)..(1514)
gccagagacgcagccgcgctcccaccacccacacccaccgcgccctcgttcgcctcttctccgggagccagtccgcgccaccgccgccgcccaggccatcgccaccctccgcagccatgtccaccaggtccgtgtcctcgtcctcctaccgcaggatgttcggcggcccgggcaccgcgagccggccgagctccagccggagctacgtgactacgtccacccgcacctacagcctgggcagcgcgctgcgccccagcaccagccgcagcctctacgcctcgtccccgggcggcgtgtatgccacgcgctcctctgccgtgcgcctgcggagcagcgtgcccggggtgcggctcctgcaggactcggtggacttctcgctggccgacgccatcaacaccgagttcaagaacacccgcaccaacgagaaggtggagctgcaggagctgaatgaccgcttcgccaactacatcgacaaggtgcgcttcctggagcagcagaataagatcctgctggccgagctcgagcagctcaagggccaaggcaagtcgcgcctgggggacctctacgaggaggagatgcgggagctgcgccggcaggtggaccagctaaccaacgacaaagcccgcgtcgaggtggagcgcgacaacctggccgaggacatcatgcgcctccgggagaaattgcaggaggagatgcttcagagagaggaagccgaaaacaccctgcaatctttcagacaggatgttgacaatgcgtctctggcacgtcttgaccttgaacgcaaagtggaatctttgcaagaagagattgcctttttgaagaaactccacgaagaggaaatccaggagctgcaggctcagattcaggaacagcatgtccaaatcgatgtggatgtttccaagcctgacctcacggctgccctgcgtgacgtacgtcagcaatatgaaagtgtggctgccaagaacctgcaggaggcagaagaatggtacaaatccaagtttgctgacctctctgaggctgccaaccggaacaatgacgccctgcgccaggcaaagcaggagtccactgagtaccggagacaggtgcagtccctcacctgtgaagtggatgcccttaaaggaaccaatgagtccctggaacgccagatgcgtgaaatggaagagaactttgccgttgaagctgctaactaccaagacactattggccgcctgcaggatgagattcagaatatgaaggaggaaatggctcgtcaccttcgtgaataccaagacctgctcaatgttaagatggcccttgacattgagattgccacctacaggaagctgctggaaggcgaggagagcaggatttctctgcctcttccaaacttttcctccctgaacctgagggaaactaatctggattcactccctctggttgatacccactcaaaaaggacacttctgattaagacggttgaaactagagatggacaggttatcaacgaaacttctcagcatcacgatgaccttgaataaaaattgcacacactcagtgcagcaatatattaccagcaagaataaaaaagaaatccatatcttaaagaaacagctttcaagtgcctttctgcagtttttcaggagcgcaagatagatttggaataggaataagctctagttcttaacaaccgacactcctacaagatttagaaaaaagtttacaacataatctagtttacagaaaaatcttgtgctagaatactttttaaaaggtattttgaataccattaaaactgcttttttttttccagcaagtatccaaccaacttggttctgcttcaataaatctttggaaaaactc

SEQ ID NO: 107 - protein, 466 aa, Homo sapiens
MSTRSVSSSSYRRMFGGPGTASRPSSSRSYVTTSTRTYSLGSALRPSTSRSLYASSPGGVYATRSSAVRLRSSVPGVRLLQDSVDFSLADAINTEFKNTRTNEKVELQELNDRFANYIDKVRFLEQQNKILLAELEQLKGQGKSRLGDLYEEEMRELRRQVDQLTNDKARVEVERDNLAEDIMRLREKLQEEMLQREEAENTLQSFRQDVDNASLARLDLERKVESLQEEIAFLKKLHEEEIQELQAQIQEQHVQIDVDVSKPDLTAALRDVRQQYESVAAKNLQEAEEWYKSKFADLSEAANRNNDALRQAKQESTEYRRQVQSLTCEVDALKGTNESLERQMREMEENFAVEAANYQDTIGRLQDEIQNMKEEMARHLREYQDLLNVKMALDIEIATYRKLLEGEESRISLPLPNFSSLNLRETNLDSLPLVDTHSKRTLLIKTVETRDGQVINETSQHHDDLE

SEQ ID NO: 108 - DNA, 14082 bp, Homo sapiens
  CDS (703)..(11388)
atgctgtctgtgaagctgaatctgtgagaacacctcactattcacggcaaccggagtggaagaaacaggtgcaaaaagattgtgtgtttgtctgcttttgtgaggctggtcagagattctgtgcctgctttatctgtgcttggctatgactctacctccaggtttaccataccccatagaatgtgtaagagaaaagtaccaacagggaaatcagcaaaaagctttcctatgaaggtgtgtagccagcctccgcagaatttgaaatgtctgaggtttcttctggtgagtaaaagctgcagataatcaacagccattcagaagaatgataaatgccacaagcatttggaaacaggcttccctaaagatgaaagagaagatgttcaaaagaaaacattcacaaaatgggtaaatgcacaattttctaagtttgggaagcagcatattgagaacctcttcagtgacctacaggatgggaggcgcctcctagacctcctcgaaggcctgacagggcaaaaactgccaaaagaaaaaggatccacaagagttcatgccctgaacaatgtcaacaaggcactgcgggttttgcagaacaataatgttgatttagtgaatattggaagtactgacatcgtagatggaaatcataaactgactcttggtttgatttggaatataatcctccactggcaggtcaaaaatgtaatgaaaaatatcatggctggattgcaacaaaccaacagtgaaaagattctcctgagctgggtccgacaatcaactcgtaattatccacaggttaatgtaatcaacttcaccaccagctggtctgatggcctggctttgaatgctctcatccatagtcataggccagacctatttgactggaatagtgtggtttgccagcagtcagccacacaacgactggaacatgcattcaacatcgccagatatcaattaggcatagagaaactactcgatcctgaagatgttgataccacctatccagataagaagtccatcttaatgtacatcacatcactcttccaagttttgcctcaacaagtgagcattgaagccatccaggaagtggaaatgttgccaaggccacctaaagtgactaaagaagaacattttcagttacatcatcaaatgcactattctcaacagatcacggtcagtctagcacagggatatgagagaacttcttcccctaagcctcgattcaagagctatgcctacacacaggctgcttatgtcaccacctctgaccctacacggagcccatttccttcacagcatttggaagctcctgaagacaagtcatttggcagttcattgatggagagtgaagtaaacctggaccgttatcaaacagctttagaagaagtattatcgtggcttctttctgctgaggacacattgcaagcacaaggagagatttctaatgatgtggaagtggtgaaagaccagtttcatactcatgaggggtacatgatggatttgacagcccatcagggccgggttggtaatattctacaattgggaagtaagctgattggaacaggaaaattatcagaagatgaagaaactgaagtacaagagcagatgaatctcctaaattcaagatgggaatgcctcagggtagctagcatggaaaaacaaagcaatttacatagagttttaatggatctccagaatcagaaactgaaagagttgaatgactggctaacaaaaacagaagaaagaacaaggaaaatggaggaagagcctcttggacctgatcttgaagacctaaaacgccaagtacaacaacataaggtgcttcaagaagatctagaacaagaacaagtcagggtcaattctctcactcacatggtggtggtagttgatgaatctagtggagatcacgcaactgctgctttggaagaacaacttaaggtattgggagatcgatgggcaaacatctgtagatggacagaagaccgctgggttcttttacaagacatccttctcaaatggcaacgtcttactgaagaacagtgcctttttagtgcatggctttcagaaaaagaagatgcagtgaacaagattcacacaactggctttaaagatcaaaatgaaatgttatcaagtcttcaaaaactggccgttttaaaagcggatctagaaaagaaaaagcaatccatgggcaaactgtattcactcaaacaagatcttctttcaacactgaagaataagtcagtgacccagaagacggaagcatggctggataactttgcccggtgttgggataatttagtccaaaaacttgaaaagagtacagcacagatttcacaggctgtcaccaccactcagccatcactaacacagacaactgtaatggaaacagtaactacggtgaccacaagggaacagatcctggtaaagcatgctcaagaggaacttccaccaccacctccccaaaagaagaggcagattactgtggattctgaaattaggaaaaggttggatgttgatataactgaacttcacagctggattactcgctcagaagctgtgttgcagagtcctgaatttgcaatctttcggaaggaaggcaacttctcagacttaaaagaaaaagtcaatgccatagagcgagaaaaagctgagaagttcagaaaactgcaagatgccagcagatcagctcaggccctggtggaacagatggtgaatgagggtgttaatgcagatagcatcaaacaagcctcagaacaactgaacagccggtggatcgaattctgccagttgctaagtgagagacttaactggctggagtatcagaacaacatcatcgctttctataatcagctacaacaattggagcagatgacaactactgctgaaaactggttgaaaatccaacccaccaccccatcagagccaacagcaattaaaagtcagttaaaaatttgtaaggatgaagtcaaccggctatcaggtcttcaacctcaaattgaacgattaaaaattcaaagcatagccctgaaagagaaaggacaaggacccatgttcctggatgcagactttgtggcctttacaaatcattttaagcaagtcttttctgatgtgcaggccagagagaaagagctacagacaatttttgacactttgccaccaatgcgctatcaggagaccatgagtgccatcaggacatgggtccagcagtcagaaaccaaactctccatacctcaacttagtgtcaccgactatgaaatcatggagcagagactcggggaattgcaggctttacaaagttctctgcaagagcaacaaagtggcctatactatctcagcaccactgtgaaagagatgtcgaagaaagcgccctctgaaattagccggaaatatcaatcagaatttgaagaaattgagggacgctggaagaagctctcctcccagctggttgagcattgtcaaaagctagaggagcaaatgaataaactccgaaaaattcagaatcacatacaaaccctgaagaaatggatggctgaagttgatgtttttctgaaggaggaatggcctgcccttggggattcagaaattctaaaaaagcagctgaaacagtgcagacttttagtcagtgatattcagacaattcagcccagtctaaacagtgtcaatgaaggtgggcagaagataaagaatgaagcagagccagagtttgcttcgagacttgagacagaactcaaagaacttaacactcagtgggatcacatgtgccaacaggtctatgccagaaaggaggccttgaagggaggtttggagaaaactgtaagcctccagaaagatctatcagagatgcacgaatggatgacacaagctgaagaagagtatcttgagagagattttgaatataaaactccagatgaattacagaaagcagttgaagagatgaagagagctaaagaagaggcccaacaaaaagaagcgaaagtgaaactccttactgagtctgtaaatagtgtcatagctcaagctccacctgtagcacaagaggccttaaaaaaggaacttgaaactctaaccaccaactaccagtggctctgcactaggctgaatgggaaatgcaagactttggaagaagtttgggcatgttggcatgagttattgtcatacttggagaaagcaaacaagtggctaaatgaagtagaatttaaacttaaaaccactgaaaacattcctggcggagctgaggaaatctctgaggtgctagattcacttgaaaatttgatgcgacattcagaggataacccaaatcagattcgcatattggcacagaccctaacagatggcggagtcatggatgagctaatcaatgaggaacttgagacatttaattctcgttggagggaactacatgaagaggctgtaaggaggcaaaagttgcttgaacagagcatccagtctgcccaggagactgaaaaatccttacacttaatccaggagtccctcacattcattgacaagcagttggcagcttatattgcagacaaggtggacgcagctcaaatgcctcaggaagcccagaaaatccaatctgatttgacaagtcatgagatcagtttagaagaaatgaagaaacataatcaggggaaggaggctgcccaaagagtcctgtctcagattgatgttgcacagaaaaaattacaagatgtctccatgaagtttcgattattccagaaaccagccaattttgagcagcgtctacaagaaagtaagatgattttagatgaagtgaagatgcacttgcctgcattggaaacaaagagtgtggaacaggaagtagtacagtcacagctaaatcattgtgtgaacttgtataaaagtctgagtgaagtgaagtctgaagtggaaatggtgataaagactggacgtcagattgtacagaaaaagcagacggaaaatcccaaagaacttgatgaaagagtaacagctttgaaattgcattataatgagctgggagcaaaggtaacagaaagaaagcaacagttggagaaatgcttgaaattgtcccgtaagatgcgaaaggaaatgaatgtcttgacagaatggctggcagctacagatatggaattgacaaagagatcagcagttgaaggaatgcctagtaatttggattctgaagttgcctggggaaaggctactcaaaaagagattgagaaacagaaggtgcacctgaagagtatcacagaggtaggagaggccttgaaaacagttttgggcaagaaggagacgttggtggaagataaactcagtcttctgaatagtaactggatagctgtcacctcccgagcagaagagtggttaaatcttttgttggaataccagaaacacatggaaacttttgaccagaatgtggaccacatcacaaagtggatcattcaggctgacacacttttggatgaatcagagaaaaagaaaccccagcaaaaagaagacgtgcttaagcgtttaaaggcagaactgaatgacatacgcccaaaggtggactctacacgtgaccaagcagcaaacttgatggcaaaccgcggtgaccactgcaggaaattagtagagccccaaatctcagagctcaaccatcgatttgcagccatttcacacagaattaagactggaaaggcctccattcctttgaaggaattggagcagtttaactcagatatacaaaaattgcttgaaccactggaggctgaaattcagcagggggtgaatctgaaagaggaagacttcaataaagatatgaatgaagacaatgagggtactgtaaaagaattgttgcaaagaggagacaacttacaacaaagaatcacagatgagagaaagcgagaggaaataaagataaaacagcagctgttacagacaaaacataatgctctcaaggatttgaggtctcaaagaagaaaaaaggctctagaaatttctcatcagtggtatcagtacaagaggcaggctgatgatctcctgaaatgcttggatgacattgaaaaaaaattagccagcctacctgagcccagagatgaaaggaaaataaaggaaattgatcgggaattgcagaagaagaaagaggagctgaatgcagtgcgtaggcaagctgagggcttgtctgaggatggggccgcaatggcagtggagccaactcagatccagctcagcaagcgctggcgggaaattgagagcaaatttgctcagtttcgaagactcaactttgcacaaattcacactgtccgtgaagaaacgatgatggtgatgactgaagacatgcctttggaaatttcttatgtgccttctacttatttgactgaaatcactcatgtctcacaagccctattagaagtggaacaacttctcaatgctcctgacctctgtgctaaggactttgaagatctctttaagcaagaggagtctctgaagaatataaaagatagtctacaacaaagctcaggtcggattgacattattcatagcaagaagacagcagcattgcaaagtgcaacgcctgtggaaagggtgaagctacaggaagctctctcccagcttgatttccaatgggaaaaagttaacaaaatgtacaaggaccgacaagggcgatttgacagatctgttgagaaatggcggcgttttcattatgatataaagatatttaatcagtggctaacagaagctgaacagtttctcagaaagacacaaattcctgagaattgggaacatgctaaatacaaatggtatcttaaggaactccaggatggcattgggcagcggcaaactgttgtcagaacattgaatgcaactggggaagaaataattcagcaatcctcaaaaacagatgccagtattctacaggaaaaattgggaagcctgaatctgcggtggcaggaggtctgcaaacagctgtcagacagaaaaaagaggctagaagaacaaaagaatatcttgtcagaatttcaaagagatttaaatgaatttgttttatggttggaggaagcagataacattgctagtatcccacttgaacctggaaaagagcagcaactaaaagaaaagcttgagcaagtcaagttactggtggaagagttgcccctgcgccagggaattctcaaacaattaaatgaaactggaggacccgtgcttgtaagtgctcccataagcccagaagagcaagataaacttgaaaataagctcaagcagacaaatctccagtggataaaggtttccagagctttacctgagaaacaaggagaaattgaagctcaaataaaagaccttgggcagcttgaaaaaaagcttgaagaccttgaagagcagttaaatcatctgctgctgtggttatctcctattaggaatcagttggaaatttataaccaaccaaaccaagaaggaccatttgacgttcaggaaactgaaatagcagttcaagctaaacaaccggatgtggaagagattttgtctaaagggcagcatttgtacaaggaaaaaccagccactcagccagtgaagaggaagttagaagatctgagctctgagtggaaggcggtaaaccgtttacttcaagagctgagggcaaagcagcctgacctagctcctggactgaccactattggagcctctcctactcagactgttactctggtgacacaacctgtggttactaaggaaactgccatctccaaactagaaatgccatcttccttgatgttggaggtacctgctctggcagatttcaaccgggcttggacagaacttaccgactggctttctctgcttgatcaagttataaaatcacagagggtgatggtgggtgaccttgaggatatcaacgagatgatcatcaagcagaaggcaacaatgcaggatttggaacagaggcgtccccagttggaagaactcattaccgctgcccaaaatttgaaaaacaagaccagcaatcaagaggctagaacaatcattacggatcgaattgaaagaattcagaatcagtgggatgaagtacaagaacaccttcagaaccggaggcaacagttgaatgaaatgttaaaggattcaacacaatggctggaagctaaggaagaagctgagcaggtcttaggacaggccagagccaagcttgagtcatggaaggagggtccctatacagtagatgcaatccaaaagaaaatcacagaaaccaagcagttggccaaagacctccgccagtggcagacaaatgtagatgtggcaaatgacttggccctgaaacttctccgggattattctgcagatgataccagaaaagtccacatgataacagagaatatcaatgcctcttggagaagcattcataaaagggtgagtgagcgagaggctgctttggaagaaactcatagattactgcaacagttccccctggacctggaaaagtttcttgcctggcttacagaagctgaaacaactgccaatgtcctacaggatgctacccgtaaggaaaggctcctagaagactccaagggagtaaaagagctgatgaaacaatggcaagacctccaaggtgaaattgaagctcacacagatgtttatcacaacctggatgaaaacagccaaaaaatcctgagatccctggaaggttccgatgatgcagtcctgttacaaagacgtttggataacatgaacttcaagtggagtgaacttcggaaaaagtctctcaacattaggtcccatttggaagccagttctgaccagtggaagcgtctgcacctttctctgcaggaacttctggtgtggctacagctgaaagatgatgaattaagccggcaggcacctattggaggcgactttccagcagttcagaagcagaacgatgtacatagggccttcaagagggaattgaaaactaaagaacctgtaatcatgagtactcttgagactgtacgaatatttctgacagagcagcctttggaaggactagagaaactctaccaggagcccagagagctgcctcctgaggagagagcccagaatgtcactcggcttctacgaaagcaggctgaggaggtcaatactgagtgggaaaaattgaacctgcactccgctgactggcagagaaaaatagatgagacccttgaaagactccaggaacttcaagaggccacggatgagctggacctcaagctgcgccaagctgaggtgatcaagggatcctggcagcccgtgggcgatctcctcattgactctctccaagatcacctcgagaaagtcaaggcacttcgaggagaaattgcgcctctgaaagagaacgtgagccacgtcaatgaccttgctcgccagcttaccactttgggcattcagctctcaccgtataacctcagcactctggaagacctgaacaccagatggaagcttctgcaggtggccgtcgaggaccgagtcaggcagctgcatgaagcccacagggactttggtccagcatctcagcactttctttccacgtctgtccagggtccctgggagagagccatctcgccaaacaaagtgccctactatatcaaccacgagactcaaacaacttgctgggaccatcccaaaatgacagagctctaccagtctttagctgacctgaataatgtcagattctcagcttataggactgccatgaaactccgaagactgcagaaggccctttgcttggatctcttgagcctgtcagctgcatgtgatgccttggaccagcacaacctcaagcaaaatgaccagcccatggatatcctgcagattattaattgtttgaccactatttatgaccgcctggagcaagagcacaacaatttggtcaacgtccctctctgcgtggatatgtgtctgaactggctgctgaatgtttatgatacgggacgaacagggaggatccgtgtcctgtcttttaaaactggcatcatttccctgtgtaaagcacatttggaagacaagtacagataccttttcaagcaagtggcaagttcaacaggattttgtgaccagcgcaggctgggcctccttctgcatgattctatccaaattccaagacagttgggtgaagttgcatcctttgggggcagtaacattgagccaagtgtccggagctgcttccaatttgctaataataagccagagatcgaagcggccctcttcctagactggatgagactggaaccccagtccatggtgtggctgcccgtcctgcacagagtggctgctgcagaaactgccaagcatcaggccaaatgtaacatctgcaaagagtgtccaatcattggattcaggtacaggagtctaaagcactttaattatgacatctgccaaagctgctttttttctggtcgagttgcaaaaggccataaaatgcactatcccatggtggaatattgcactccgactacatcaggagaagatgttcgagactttgccaaggtactaaaaaacaaatttcgaaccaaaaggtattttgcgaagcatccccgaatgggctacctgccagtgcagactgtcttagagggggacaacatggaaactcccgttactctgatcaacttctggccagtagattctgcgcctgcctcgtcccctcagctttcacacgatgatactcattcacgcattgaacattatgctagcaggctagcagaaatggaaaacagcaatggatcttatctaaatgatagcatctctcctaatgagagcatagatgatgaacatttgttaatccagcattactgccaaagtttgaaccaggactcccccctgagccagcctcgtagtcctgcccagatcttgatttccttagagagtgaggaaagaggggagctagagagaatcctagcagatcttgaggaagaaaacaggaatctgcaagcagaatatgaccgtctaaagcagcagcacgaacataaaggcctgtccccactgccgtcccctcctgaaatgatgcccacctctccccagagtccccgggatgctgagctcattgctgaggccaagctactgcgtcaacacaaaggccgcctggaagccaggatgcaaatcctggaagaccacaataaacagctggagtcacagttacacaggctaaggcagctgctggagcaaccccaggcagaggccaaagtgaatggcacaacggtgtcctctccttctacctctctacagaggtccgacagcagtcagcctatgctgctccgagtggttggcagtcaaacttcggactccatgggtgaggaagatcttctcagtcctccccaggacacaagcacagggttagaggaggtgatggagcaactcaacaactccttccctagttcaagaggaagaaatacccctggaaagccaatgagagaggacacaatgtaggaagtcttttccacatggcagatgatttgggcagagcgatggagtccttagtatcagtcatgacagatgaagaaggagcagaataaatgttttacaactcctgattcccgcatggtttttataatattcatacaacaaagaggattagacagtaagagtttacaagaaataaatctatatttttgtgaagggtagtggtattatactgtagatttcagtagtttctaagtctgttattgttttgttaacaatggcaggttttacacgtctatgcaattgtacaaaaaagttataagaaaactacatgtaaaatcttgatagctaaataacttgccatttctttatatggaacgcattttgggttgtttaaaaatttataacagttataaagaaagattgtaaactaaagtgtgctttataaaaaaaagttgtttataaaaacccctaaaaacaaaacaaacacacacacacacacatacacacacacacacaaaactttgaggcagcgcattgttttgcatccttttggcgtgatatccatatgaaattcatggctttttctttttttgcatattaaagataagacttcctctaccaccacaccaaatgactactacacactgctcatttgagaactgtcagctgagtggggcaggcttgagttttcatttcatatatctatatgtctataagtatataaatactatagttatatagataaagagatacgaatttctatagactgactttttccattttttaaatgttcatgtcacatcctaatagaaagaaattacttctagtcagtcatccaggcttacctgcttggtctagaatggatttttcccggagccggaagccaggaggaaactacaccacactaaaacattgtctacagctccagatgtttctcattttaaacaactttccactgacaacgaaagtaaagtaaagtattggatttttttaaagggaacatgtgaatgaatacacaggacttattatatcagagtgagtaatcggttggttggttgattgattgattgattgatacattcagcttcctgctgctagcaatgccacgatttagatttaatgatgcttcagtggaaatcaatcagaaggtattctgaccttgtgaacatcagaaggtattttttaactcccaagcagtagcaggacgatgatagggctggagggctatggattcccagcccatccctgtgaaggagtaggccactctttaagtgaaggattggatgattgttcataatacataaagttctctgtaattacaactaaattattatgccctcttctcacagtcaaaaggaactgggtggtttggtttttgttgcttttttagatttattgtcccatgtgggatgagtttttaaatgccacaagacataatttaaaataaataaactttgggaaaaggtgtaagacagtagccccatcacatttgtgatactgacaggtatcaacccagaagcccatgaactgtgtttccatcctttgcatttctctgcgagtagttccacacaggtttgtaagtaagtaagaaagaaggcaaattgattcaaatgttacaaaaaaacccttcttggtggattagacaggttaaatatataaacaaacaaacaaaaattgctcaaaaaagaggagaaaagctcaagaggaaaagctaaggactggtaggaaaaagctttactctttcatgccattttatttctttttgatttttaaatcattcattcaatagataccaccgtgtgacctataattttgcaaatctgttacctctgacatcaagtgtaattagcttttggagagtgggctgacatcaagtgtaattagcttttggagagtgggttttgtccattattaataattaattaattaacatcaaacacggcttctcatgctatttctacctcactttggttttggggtgttcctgataattgtgcacacctgagttcacagcttcaccacttgtccattgcgttattttctttttcctttataattctttctttttccttcataattttcaaaagaaaacccaaagctctaaggtaacaaattaccaaattacatgaagatttggtttttgtcttgcatttttttcctttatgtgacgctggaccttttctttacccaaggatttttaaaactcagatttaaaacaaggggttactttacatcctactaagaagtttaagtaagtaagtttcattctaaaatcagaggtaaatagagtgcataaataattttgttttaatctttttgtttttcttttagacacattagctctggagtgagtctgtcataatatttgaacaaaaattgagagctttattgctgcattttaagcataattaatttggacattatttcgtgttgtgttctttataaccaccgagtattaaactgtaaatcataatgtaactgaagcataaacatcacatggcatgttttgtcattgttttcaggtactgagttcttacttgagtatcataatatattgtgttttaacaccaacactgtaacatttacgaattatttttttaaacttcagttttactgcattttcacaacatatcagacttcaccaaatatatgccttactattgtattatagtactgctttactgtgtatctcaataaagcacgcagttatgttac

SEQ ID NO: 109 - protein, 3562 aa, Homo sapiens
MKNIMAGLQQTNSEKILLSWVRQSTRNYPQVNVINFTTSWSDGLALNALIHSHRPDLFDWNSVVCQQSATQRLEHAFNIARYQLGIEKLLDPEDVDTTYPDKKSILMYITSLFQVLPQQVSIEAIQEVEMLPRPPKVTKEEHFQLHHQMHYSQQITVSLAQGYERTSSPKPRFKSYAYTQAAYVTTSDPTRSPFPSQHLEAPEDKSFGSSLMESEVNLDRYQTALEEVLSWLLSAEDTLQAQGEISNDVEVVKDQFHTHEGYMMDLTAHQGRVGNILQLGSKLIGTGKLSEDEETEVQEQMNLLNSRWECLRVASMEKQSNLHRVLMDLQNQKLKELNDWLTKTEERTRKMEEEPLGPDLEDLKRQVQQHKVLQEDLEQEQVRVNSLTHMVVVVDESSGDHATAALEEQLKVLGDRWANICRWTEDRWVLLQDILLKWQRLTEEQCLFSAWLSEKEDAVNKIHTTGFKDQNEMLSSLQKLAVLKADLEKKKQSMGKLYSLKQDLLSTLKNKSVTQKTEAWLDNFARCWDNLVQKLEKSTAQISQAVTTTQPSLTQTTVMETVTTVTTREQILVKHAQEELPPPPPQKKRQITVDSEIRKRLDVDITELHSWITRSEAVLQSPEFAIFRKEGNFSDLKEKVNAIEREKAEKFRKLQDASRSAQALVEQMVNEGVNADSIKQASEQLNSRWIEFCQLLSERLNWLEYQNNIIAFYNQLQQLEQMTTTAENWLKIQPTTPSEPTAIKSQLKICKDEVNRLSGLQPQIERLKIQSIALKEKGQGPMFLDADFVAFTNHFKQVFSDVQAREKELQTIFDTLPPMRYQETMSAIRTWVQQSETKLSIPQLSVTDYEIMEQRLGELQALQSSLQEQQSGLYYLSTTVKEMSKKAPSEISRKYQSEFEEIEGRWKKLSSQLVEHCQKLEEQMNKLRKIQNHIQTLKKWMAEVDVFLKEEWPALGDSEILKKQLKQCRLLVSDIQTIQPSLNSVNEGGQKIKNEAEPEFASRLETELKELNTQWDHMCQQVYARKEALKGGLEKTVSLQKDLSEMHEWMTQAEEEYLERDFEYKTPDELQKAVEEMKRAKEEAQQKEAKVKLLTESVNSVIAQAPPVAQEALKKELETLTTNYQWLCTRLNGKCKTLEEVWACWHELLSYLEKANKWLNEVEFKLKTTENIPGGAEEISEVLDSLENLMRHSEDNPNQIRILAQTLTDGGVMDELINEELETFNSRWRELHEEAVRRQKLLEQSIQSAQETEKSLHLIQESLTFIDKQLAAYIADKVDAAQMPQEAQKIQSDLTSHEISLEEMKKHNQGKEAAQRVLSQIDVAQKKLQDVSMKFRLFQKPANFEQRLQESKMILDEVKMHLPALETKSVEQEVVQSQLNHCVNLYKSLSEVKSEVEMVIKTGRQIVQKKQTENPKELDERVTALKLHYNELGAKVTERKQQLEKCLKLSRKMRKEMNVLTEWLAATDMELTKRSAVEGMPSNLDSEVAWGKATQKEIEKQKVHLKSITEVGEALKTVLGKKETLVEDKLSLLNSNWIAVTSRAEEWLNLLLEYQKHMETFDQNVDHITKWIIQADTLLDESEKKKPQQKEDVLKRLKAELNDIRPKVDSTRDQAANLMANRGDHCRKLVEPQISELNHRFAAISHRIKTGKASIPLKELEQFNSDIQKLLEPLEAEIQQGVNLKEEDFNKDMNEDNEGTVKELLQRGDNLQQRITDERKREEIKIKQQLLQTKHNALKDLRSQRRKKALEISHQWYQYKRQADDLLKCLDDIEKKLASLPEPRDERKIKEIDRELQKKKEELNAVRRQAEGLSEDGAAMAVEPTQIQLSKRWREIESKFAQFRRLNFAQIHTVREETMMVMTEDMPLEISYVPSTYLTEITHVSQALLEVEQLLNAPDLCAKDFEDLFKQEESLKNIKDSLQQSSGRIDIIHSKKTAALQSATPVERVKLQEALSQLDFQWEKVNKMYKDRQGRFDRSVEKWRRFHYDIKIFNQWLTEAEQFLRKTQIPENWEHAKYKWYLKELQDGIGQRQTVVRTLNATGEEIIQQSSKTDASILQEKLGSLNLRWQEVCKQLSDRKKRLEEQKNILSEFQRDLNEFVLWLEEADNIASIPLEPGKEQQLKEKLEQVKLLVEELPLRQGILKQLNETGGPVLVSAPISPEEQDKLENKLKQTNLQWIKVSRALPEKQGEIEAQIKDLGQLEKKLEDLEEQLNHLLLWLSPIRNQLEIYNQPNQEGPFDVQETEIAVQAKQPDVEEILSKGQHLYKEKPATQPVKRKLEDLSSEWKAVNRLLQELRAKQPDLAPGLTTIGASPTQTVTLVTQPVVTKETAISKLEMPSSLMLEVPALADFNRAWTELTDWLSLLDQVIKSQRVMVGDLEDINEMIIKQKATMQDLEQRRPQLEELITAAQNLKNKTSNQEARTIITDRIERIQNQWDEVQEHLQNRRQQLNEMLKDSTQWLEAKEEAEQVLGQARAKLESWKEGPYTVDAIQKKITETKQLAKDLRQWQTNVDVANDLALKLLRDYSADDTRKVHMITENINASWRSIHKRVSEREAALEETHRLLQQFPLDLEKFLAWLTEAETTANVLQDATRKERLLEDSKGVKELMKQWQDLQGEIEAHTDVYHNLDENSQKILRSLEGSDDAVLLQRRLDNMNFKWSELRKKSLNIRSHLEASSDQWKRLHLSLQELLVWLQLKDDELSRQAPIGGDFPAVQKQNDVHRAFKRELKTKEPVIMSTLETVRIFLTEQPLEGLEKLYQEPRELPPEERAQNVTRLLRKQAEEVNTEWEKLNLHSADWQRKIDETLERLQELQEATDELDLKLRQAEVIKGSWQPVGDLLIDSLQDHLEKVKALRGEIAPLKENVSHVNDLARQLTTLGIQLSPYNLSTLEDLNTRWKLLQVAVEDRVRQLHEAHRDFGPASQHFLSTSVQGPWERAISPNKVPYYINHETQTTCWDHPKMTELYQSLADLNNVRFSAYRTAMKLRRLQKALCLDLLSLSAACDALDQHNLKQNDQPMDILQIINCLTTIYDRLEQEHNNLVNVPLCVDMCLNWLLNVYDTGRTGRIRVLSFKTGIISLCKAHLEDKYRYLFKQVASSTGFCDQRRLGLLLHDSIQIPRQLGEVASFGGSNIEPSVRSCFQFANNKPEIEAALFLDWMRLEPQSMVWLPVLHRVAAAETAKHQAKCNICKECPIIGFRYRSLKHFNYDICQSCFFSGRVAKGHKMHYPMVEYCTPTTSGEDVRDFAKVLKNKFRTKRYFAKHPRMGYLPVQTVLEGDNMETPVTLINFWPVDSAPASSPQLSHDDTHSRIEHYASRLAEMENSNGSYLNDSISPNESIDDEHLLIQHYCQSLNQDSPLSQPRSPAQILISLESEERGELERILADLEEENRNLQAEYDRLKQQHEHKGLSPLPSPPEMMPTSPQSPRDAELIAEAKLLRQHKGRLEARMQILEDHNKQLESQLHRLRQLLEQPQAEAKVNGTTVSSPSTSLQRSDSSQPMLLRVVGSQTSDSMGEEDLLSPPQDTSTGLEEVMEQLNNSFPSSRGRNTPGKPMREDTM

SEQ ID NO: 110 - DNA, 4425 bp, Homo sapiens
  CDS (407)..(1969)
gcgcgcgtggggctccattccgcggtgctgggtctccgtgccggggtgggtgctcgtgtgtgcgcttctcctccccatcccccttcccccaagaataaaagaagaaccgggaggcgtgctcagaaaataaataaataaccaccacacacgcgcagcccggagcgagtcggcggggctggcggcagcggcggaggaggagtgaaggcggcggcggcggaggagggacgcgcggaaaaggcagcaactttaaagccagctcagagcctagacctccagccgagcggtttgcagcgcggcggcggcggcggcggcggcggcggcggcgttgagtgtctggcccgccggtccggtcggggtgtgcagtcggacggacgagcagcgcgtcgctgtcctccggcagctggagatgtccgagcccaaggcaattgatcccaagttgtcgacgaccgacagggtggtgaaagctgttccatttcctccaagtcaccggcttacagcaaaagaagtgtttgataatgatggaaaacctcgtgtggatatcttaaaggcgcatcttatgaaggagggaaggctggaagagagtgttgcattgagaataataacagagggtgcatcaattcttcgacaggaaaaaaatttgctggatattgatgcgccagtcactgtttgtggggacattcatggacaattctttgatttgatgaagctctttgaagtcgggggatctcctgccaacactcgctacctcttcttaggggactatgttgacagagggtacttcagtattgaatgtgtgctgtatttgtgggccttgaaaattctctaccccaaaacactgtttttacttcgtggaaatcatgaatgtagacatctaacagagtatttcacatttaaacaagaatgtaaaataaagtattcagaacgcgtatatgatgcctgtatggatgcctttgactgccttcccctggctgccctgatgaaccaacagttcctgtgtgtgcatggtggtttgtctccagagattaacactttagatgatatcagaaaattagaccgattcaaagaaccacctgcatatggacctatgtgtgatatcctgtggtcagaccccctggaagattttggaaatgagaagactcaggaacatttcactcacaacacagtcagggggtgttcatacttctacagttacccggctgtatgtgaattcttacagcacaataacttgttatctatactccgagcccacgaagcccaagatgcagggtaccgcatgtacaggaaaagccaaacaacaggcttcccttctctaattacaattttttcagcaccaaattacttagatgtatacaataacaaagctgcagtattgaagtatgagaacaatgttatgaatatcaggcaattcaactgttctcctcatccatactggcttccaaatttcatggatgtttttacttggtcccttccatttgttggggaaaaagtgactgagatgctggtaaatgtcctcaacatctgctcagatgatgaactagggtcagaagaagatggatttgatggtgcaacagctgcagcccggaaagaggtgataaggaacaagatccgagcaataggcaaaatggccagagtgttctcagtgctcagagaagagagtgagagtgtgctgacgctgaaaggcttgaccccaactggcatgctccccagcggagtactttctggagggaagcaaaccctgcaaagcgctactgttgaggctattgaggctgatgaagctatcaaaggattttcaccacaacataagatcactagcttcgaggaagccaagggcttagaccgaattaatgagaggatgccgcctcgcagagatgccatgccctctgacgccaaccttaactccatcaacaaggctctcacctcagagactaacggcacggacagcaatggcagtaatagcagcaatattcagtgaccacttcctgttcacttttttttttttttttttttttttttgagctgcggggcatgatggggattgctgcatatcagcagttggatgttcttgcctctgacagtagcttatttgctctgggggccaggaattggattcagtttacactatcattaaaaaagagggagagagataataaactatattttggtggggatggtgattaaacacctcttttgggtatgccttttaaaaatgcttatagagaaaaaaattttaaaaagaaagctaatgctagtatatactgcaatgttaggggaatgaacatgttttcctactgcattggggacttctagataggttaatgaaaggccttttattctgttactggacatgaaaactttgtctaatttcttactctattgtacgtttacagtcgcagcactaaaaatggatgacatcaaacatttttaacaaaatgatgtacaaactaaggactatttattgataatgttttgctactcttgtcagacaatggctataaactgaattaggcagtcttaaaaaaaaaaaaaaaacagaaaaagaaaaaaaagaacgttgcaaatttgttaaaatgccaaaaaggacagtttaattttgtacagattatgcttacctcaggtttctttagtgtgcttgaatgcccttctttccatataacacttatcttcttcttaattcggcaatggaatatcttttaagttttaaaaaaactggaataattatatctatcttttttgccgtttatatttaggggtttttgttgataaaatcaagtcttggttgtggcttgctgaattaaatatttatgagtggtgcatttttaagtatagtgaacaagacaccatattaagtacagtgataaagcatctatattctgtaaaaaaaaaaaaaatctgcctatgcatgttttttaagaaaaaaaaaatggctgtatcggcctgtatgggactgtaatgcgcttagtggtctgacatatactggaaatgtatgtatactggcgtactttatattctctaaaatgcttaatgcctttgaaattttgtaatcaaaaaaaagctttgaaaaaatctaaaggggagagtattctttaaagtttttaacataagcttgtcaatgcacatgtagatggttagcatgtttagcaaaccttgtgaaattataataagtttgtagttacatgtgaaactctaaatgcatggcaactgttaatgtcataacagtttagttattttgttctgttctgtcatgtgccacaaaatatgtacttttttcacttttttccctttgtatatcagttacgggttacaactggttcattctgaaaacaacaacaacaaaagtccattcatattttttaacaattgtataagtgcccaagtaattcactacagcctaaagccttgcctttgtaatttgacttctgacatgttggcaatcaaagcatgcacttgtaacaatgaaaaagaaaaagcattttatattactactcaataaaatgtgcatgaacttacagaattctcatccttccactgagtccgctgaagggatttatgtgcacaaccaccatgtgtcttctaggtgctggcccaccaccacacatcacaggctgatttccacaggcttcttcctaggggcctcgtgatctgaggggtggtgcctacttccactgtaagaaagaatcttggtggatttgtgtctcaaatcagataagagaagcctgtttaaagagcagatgccatcttctggcttcctcaaggagccagttaaaaaaccagagcattcctttttattgaaaaataaaattaatttgttatcaggttgtttcagttgtattggatgccctatctatctgctaaagcaaaaagtactaggctactaagtgcattttcatcacagaaaagagttgcatttgtattaacaagaaatttgtatacccacgcttcagctactatctaatcatcacccgaagatttaagatacaccaaatttcagtttgtttgtaacattgttcatctttagtgcactttgttttatataataaagtatgcctgttatattaaataataagaatatggcaattagcgatatagcatacccaaacaaagatgttctcgatacagtctggcaaagactatcccaaggttattttaatgaattcagacattttttcctgtggatatttctccatcctaaaaaaagtggcaaccaaggaaaatatttagatgcaacttactagagtgatgatgtgaaagaaatggtgattctggtatcatggtgtttattttctttcttataactgcagagaaaatatcctgactaaaaaaatttcatttttttggattcctttcttttacaaattgtgctgaggcaactatggcatagaaataaacatttgacattaaaataagtaaaaaaaaaaaaaaaaaaaa

SEQ ID NO: 111 - protein, 521 aa, Homo sapiens
MSEPKAIDPKLSTTDRVVKAVPFPPSHRLTAKEVFDNDGKPRVDILKAHLMKEGRLEESVALRIITEGASILRQEKNLLDIDAPVTVCGDIHGQFFDLMKLFEVGGSPANTRYLFLGDYVDRGYFSIECVLYLWALKILYPKTLFLLRGNHECRHLTEYFTFKQECKIKYSERVYDACMDAFDCLPLAALMNQQFLCVHGGLSPEINTLDDIRKLDRFKEPPAYGPMCDILWSDPLEDFGNEKTQEHFTHNTVRGCSYFYSYPAVCEFLQHNNLLSILRAHEAQDAGYRMYRKSQTTGFPSLITIFSAPNYLDVYNNKAAVLKYENNVMNIRQFNCSPHPYWLPNFMDVFTWSLPFVGEKVTEMLVNVLNICSDDELGSEEDGFDGATAAARKEVIRNKIRAIGKMARVFSVLREESESVLTLKGLTPTGMLPSGVLSGGKQTLQSATVEAIEADEAIKGFSPQHKITSFEEAKGLDRINERMPPRRDAMPSDANLNSINKALTSETNGTDSNGSNSSNIQ

SEQ ID NO: 112 - DNA, 986 bp, Homo sapiens
  CDS (76)..(279)
tgcgaacggcgagcagcggcggcggcgcggagagacgcagcggaggttttcctggtttcggaccccagcggccggatggtgaaatcctccctgcagcggatcctcaatagccactgcttcgccagagagaaggaaggggataaacccagcgccaccatccacgccagccgcaccatgccgctccttagcctgcacagccgcggcggcagcagcagtgagagttccagggtctccctccactgctgtagtaacccgggtccggggcctcggtggtgctcctgatgcccctcacccacccctgaagatcccaggtgggcgagggaatagtcagagggatcacaatctttcagctaacttattctactccgatgatcggctgaatgtaacagaggaactaacgtccaacgacaagacgaggattctcaacgtccagtccaggctcacagacgccaaacgcattaactggcgaacagtgctgagtggcggcagcctctacatcgagatcccgggcggcgcgctgcccgaggggagcaaggacagctttgcagttctcctggagttcgctgaggagcagctgcgagccgaccatgtcttcatttgcttccacaagaaccgcgaggacagagccgccttgctccgaaccttcagctttttgggctttgagattgtgagaccggggcatccccttgtccccaagagacccgacgcttgcttcatggcctacacgttcgagagagagtcttcgggagaggaggaggagtagggccgcctcggggctgggcatccggcccctggggccaccccttgtcagccgggtgggtaggaaccgtagactcgctcatctcgcctgggtttgtccgcatgttgtaatcgtgcaaataaacgctcactccgaattagcggtgtatttcttgaagtttaatattgtgtttgtgatactgaagtatttgctttaattctaaataaaaatttatattttacttttt

SEQ ID NO: 113 - protein, 68 aa, Homo sapiens
MVKSSLQRILNSHCFAREKEGDKPSATIHASRTMPLLSLHSRGGSSSESSRVSLHCCSNPGPGPRWCS

SEQ ID NO: 114 - DNA, 1809 bp, Homo sapiens
  CDS (55)..(1587)
cctgctccaaggtccagagagctttctggtctttgcagcaggcctgccgccttcatgtccactctcctcatcaatcagccccagtatgcgtggctgaaagagctggggctccgcgaggaaaacgagggcgtgtataatggaagctggggaggccggggagaggttattacgacctattgccccgctaacaacgagccaatagcaagagtccgacaggccagtgtggcagactatgaagaaactgtaaagaaagcaagagaagcatggaaaatctgggcagatattcctgctccaaaacgaggagaaatagtaagacagattggcgatgccttgcgggagaagatccaagtactaggaagcttggtgtctttggagatggggaaaatcttagtggaaggtgtgggtgaagttcaggagtatgtggatatctgtgactatgctgttggtttatcaaggatgattggaggacctatcttgccttctgaaagatctggccatgcactgattgagcagtggaatcccgtaggcctggttggaatcatcacggcattcaatttccctgtggcagtgtatggttggaacaacgccatcgccatgatctgtggaaatgtctgcctctggaaaggagctccaaccacttccctcattagtgtggctgtcacaaagataatagccaaggttctggaggacaacaagctgcctggtgcaatttgttccttgacttgtggtggagcagatattggcacagcaatggccaaagatgaacgagtgaacctgctgtccttcactgggagcactcaggtgggaaaacaggtgggcctgatggtgcaggagaggtttgggagaagtctgttggaacttggaggaaacaatgccattattgcctttgaagatgcagacctcagcttagttgttccatcagctctcttcgctgctgtgggaacagctggccagaggtgtaccactgcgaggcgactgtttatacatgaaagcatccatgatgaggttgtaaacagacttaaaaaggcctatgcacagatccgagttgggaacccatgggaccctaatgttctctatgggccactccacaccaagcaggcagtgagcatgtttcttggagcagtggaagaagcaaagaaagaaggtggcacagtggtctatgggggcaaggttatggatcgccctggaaattatgtagaaccgacaattgtgacaggtcttggccacgatgcgtccattgcacacacagagactttcgctccgattctctatgtctttaaattcaagaatgaagaagaggtctttgcatggaataatgaagtaaaacagggactttcaagtagcatctttaccaaagatctgggcagaatctttcgctggcttggacctaaaggatcagactgtggcattgtaaatgtcaacattccaacaagtggggctgagattggaggtgcctttggaggagaaaagcacactggtggtggcagggagtctggcagtgatgcctggaaacagtacatgagaaggtctacttgtactatcaactacagtaaagaccttcctctggcccaaggaatcaagtttcagtaaaggtgttttagatgaacatcccttaatttgaggtgttccagcagctgtttttggagaagacaaagaagattaaagttttccctgaataaatgcattattatgactgtgacagtgactaatccccctatgaccccaaagccctgattaaatcaagagattccttttttaaaaatcaaaataaaattgttacaacatagccatagttactaaaaaaaaaaa

SEQ ID NO: 115 - protein, 511 aa, Homo sapiens
MSTLLINQPQYAWLKELGLREENEGVYNGSWGGRGEVITTYCPANNEPIARVRQASVADYEETVKKAREAWKIWADIPAPKRGEIVRQIGDALREKIQVLGSLVSLEMGKILVEGVGEVQEYVDICDYAVGLSRMIGGPILPSERSGHALIEQWNPVGLVGIITAFNFPVAVYGWNNAIAMICGNVCLWKGAPTTSLISVAVTKIIAKVLEDNKLPGAICSLTCGGADIGTAMAKDERVNLLSFTGSTQVGKQVGLMVQERFGRSLLELGGNNAIIAFEDADLSLVVPSALFAAVGTAGQRCTTARRLFIHESIHDEVVNRLKKAYAQIRVGNPWDPNVLYGPLHTKQAVSMFLGAVEEAKKEGGTVVYGGKVMDRPGNYVEPTIVTGLGHDASIAHTETFAPILYVFKFKNEEEVFAWNNEVKQGLSSSIFTKDLGRIFRWLGPKGSDCGIVNVNIPTSGAEIGGAFGGEKHTGGGRESGSDAWKQYMRRSTCTINYSKDLPLAQGIKFQ

SEQ ID NO: 116 - DNA, 3911 bp, Homo sapiens
  CDS (141)..(3086)
caggtgattgactggccagctgcctgaaggagcgccaggtcctccttgctggcaggtggcgaagcccattggggcggcggtgcagaccgcggcggcggctgcggcggtctggctcgggaggcgttcctggggccaaggccatggccccgcggctgcagctggagaaggcggcctggcgctgggcggagacggtgcggcccgaggaggtgtcgcaggagcacatcgagaccgcttaccgcatctggctggagccctgcattcgcggcgtgtgcagacgaaactgcaaaggaaatccgaattgcttggttggtattggtgagcatatttggttaggagaaatagatgaaaatagttttcataacatcgatgatcccaactgtgagaggagaaaaaagaactcatttgtgggcctgactaaccttggagccacttgttatgtcaacacatttcttcaagtgtggtttctcaacttggagcttcggcaggcactctacttatgtccaagcacttgtagtgactacatgctgggagacggcatccaagaagaaaaagattatgagcctcaaacaatttgtgagcatctccagtacttgtttgccttgttgcaaaacagtaataggcgatacattgatccatcaggatttgttaaagccttgggcctggacactggacaacagcaggatgctcaagaattttcaaagctctttatgtctctattggaagatactttgtctaaacaaaagaatccagatgtgcgcaatattgttcaacagcagttctgtggagaatatgcctatgtaactgtttgcaaccagtgtggcagagagtctaagcttttgtcaaaattttatgagctggagttaaatatccaaggccacaaacagttaacagattgtatctcggaatttttgaaggaagaaaaattagaaggagacaatcgctatttttgcgagaactgtcaaagcaaacagaatgcaacaagaaagattcgacttcttagccttccttgcactctgaacttgcagctaatgcgttttgtctttgacaggcaaactggacataagaaaaagctgaatacctacattggcttctcagaaattttggatatggagccttatgtggaacataaaggtgggtcctacgtgtatgaactcagcgcagtcctcatacacagaggagtgagtgcttattctggccactacatcgcccacgtgaaagatccacagtctggtgaatggtataagtttaatgatgaagacatagaaaagatggaggggaagaaattacaactagggattgaggaagatctagcagaaccttctaagtctcagacacgtaaacccaagtgtggcaaaggaactcattgctctcgaaatgcatatatgttggtttatagactgcaaactcaagaaaagcccaacactactgttcaagttccagcctttcttcaagagctggtagatcgggataattccaaatttgaggagtggtgtattgaaatggctgagatgcgtaagcaaagtgtggataaaggaaaagcaaaacacgaagaggttaaggagctgtaccaaaggttacctgctggagctgagccctatgagtttgtctctctggaatggctgcaaaagtggttggatgaatcaacacctaccaaacctattgataatcacgcttgcctgtgttcccatgacaagcttcacccggataaaatatcaattatgaagaggatatctgaatatgcagctgacattttctatagtagatatggaggaggtccaagactaactgtgaaagccctgtgtaaggaatgtgtagtagaacgttgtcgcatattgcgtctgaagaaccaactaaatgaagattataaaactgttaataatctgctgaaagcagcagtaaagggcgatggattttgggtggggaagtcctccttgcggagttggcgccagctagctcttgaacagctggatgagcaagatggtgatgcagaacaaagcaacggaaagatgaacggtagcaccttaaataaagatgaatcaaaggaagaaagaaaagaagaggaggaattaaattttaatgaagatattctgtgtccacatggtgagttatgcatatctgaaaatgaaagaaggcttgtttctaaagaggcttggagcaaactgcagcagtactttccaaaggctcctgagtttccaagttacaaagagtgctgttcacagtgcaagattttagaaagagaaggggaagaaaatgaagccttacataagatgattgcaaacgagcaaaagacttctctcccaaatttgttccaggataaaaacagaccgtgtctcagtaactggccagaggatacggatgtcctctacatcgtgtctcagttctttgtagaagagtggcggaaatttgttagaaagcctacaagatgcagccctgtgtcatcagttgggaacagtgctcttttgtgtccccacgggggcctcatgtttacatttgcttccatgaccaaagaagattctaaacttatagctctcatatggcccagtgagtggcaaatgatacaaaagctctttgttgtggatcatgtaattaaaatcacgagaattgaagtgggagatgtaaacccttcagaaacacagtatatttctgagcccaaactctgtccagaatgcagagaaggcttattgtgtcagcagcagagggacctgcgtgaatacactcaagccaccatctatgtccataaagttgtggataataaaaaggtgatgaaggattcggctccggaactgaatgtgagtagttctgaaacagaggaggacaaggaagaagctaaaccagatggagaaaaagatccagattttaatcaaatcatgcatgcattttcagttgctccttttgaccagaatttgtcaattgatggaaagattttaagtgatgactgtgccaccctaggcacccttggcgtcattcctgaatctgtcattttattgaaggctgatgaaccaattgcagattatgctgcaatggatgatgtcatgcaagtttgtatgccagaagaagggtttaaaggtactggtcttcttggacattaatctttgaatacttgctgactgctaagaaatgaccagaggggaagaggagtttgacatgttagggcattaaagcaaaggtggatttaagaattaaaccattacatgccccttccaaaaggcagaaatccattcaaacgtgactgtcccaaatgccttatgtcaaataaagcagattgcactgatggacatcagacttgaaggaaatgtttccaattttatatttaaggggggtggtgggtgggagggggcaagtaaagacggaacaagtttagtagcagtaatagtaaatcatgtttacatatgagatttatagtcgtgggaggggaataaagttctgttatatttccttgctcgagtttcataccagatgcgttggtccataaaggattgtatcaagtagatgggacaacattctgctctgaacgaaaagtaattttagagacataacctgcttaccaatgcctgtctttgattcatattctactttcaataaagcatgaaagtgaagaacttgtcctaagtgtggaaaagtgtcttcagatttagactcttctccatgtcagctgcagcgccacccgccttacacctgcccggccgtctgtctcttggtattgggtaaaggagggggcacctgcatgtctcctgcaatgagcaaggaattatgtctcatgttttgacttcagaggctttttgctttggtgcatttcagaaaggatggagaacatttattatgtgtgaaagcatcctcttccggttttgctgttattcaaaagtgggaaatgtacctggcacgtttgaaaataaaaaatctgactacctatc

SEQ ID NO: 117 - protein, 982 aa, Homo sapiens
MAPRLQLEKAAWRWAETVRPEEVSQEHIETAYRIWLEPCIRGVCRRNCKGNPNCLVGIGEHIWLGEIDENSFHNIDDPNCERRKKNSFVGLTNLGATCYVNTFLQVWFLNLELRQALYLCPSTCSDYMLGDGIQEEKDYEPQTICEHLQYLFALLQNSNRRYIDPSGFVKALGLDTGQQQDAQEFSKLFMSLLEDTLSKQKNPDVRNIVQQQFCGEYAYVTVCNQCGRESKLLSKFYELELNIQGHKQLTDCISEFLKEEKLEGDNRYFCENCQSKQNATRKIRLLSLPCTLNLQLMRFVFDRQTGHKKKLNTYIGFSEILDMEPYVEHKGGSYVYELSAVLIHRGVSAYSGHYIAHVKDPQSGEWYKFNDEDIEKMEGKKLQLGIEEDLAEPSKSQTRKPKCGKGTHCSRNAYMLVYRLQTQEKPNTTVQVPAFLQELVDRDNSKFEEWCIEMAEMRKQSVDKGKAKHEEVKELYQRLPAGAEPYEFVSLEWLQKWLDESTPTKPIDNHACLCSHDKLHPDKISIMKRISEYAADIFYSRYGGGPRLTVKALCKECVVERCRILRLKNQLNEDYKTVNNLLKAAVKGDGFWVGKSSLRSWRQLALEQLDEQDGDAEQSNGKMNGSTLNKDESKEERKEEEELNFNEDILCPHGELCISENERRLVSKEAWSKLQQYFPKAPEFPSYKECCSQCKILEREGEENEALHKMIANEQKTSLPNLFQDKNRPCLSNWPEDTDVLYIVSQFFVEEWRKFVRKPTRCSPVSSVGNSALLCPHGGLMFTFASMTKEDSKLIALIWPSEWQMIQKLFVVDHVIKITRIEVGDVNPSETQYISEPKLCPECREGLLCQQQRDLREYTQATIYVHKVVDNKKVMKDSAPELNVSSSETEEDKEEAKPDGEKDPDFNQIMHAFSVAPFDQNLSIDGKILSDDCATLGTLGVIPESVILLKADEPIADYAAMDDVMQVCMPEEGFKGTGLLGH

SEQ ID NO: 118 - DNA, 401 bp, Homo sapiens
  CDS (68)..(220)
cttccgccagcttccctcctcttcctttctccgccatcgtggtgtgttcttgactccgctgctcgccatgtcttctcacaagactttcaggattaagcgattcctggccaagaaacaaaagcaaaatcgtcccattccccagtggattcggatgaaaactggaaataaaatcaggtacaactccaaaaggagacattggagaagaaccaagctgggtctataaggaattgcacatgagatggcacacatatttatgctgtctgaaggtcacgatcatgttaccatatcaagctgaaaatgtcaccactatctggagatttcgacgtgttttcctctctgaatctgttatgaacacgttggttggctggattcagtaataaatatgtaaggcctttcttttt

SEQ ID NO: 119 - protein, 51 aa, Homo sapiens [sequence omitted]

SEQ ID NO: 120 - DNA, 3042 bp, Homo sapiens
  CDS (148)..(1350)
cggaggcgctgggcgcacggcgcggagccggccggagctcgaggccggcggcggcgggagagcgacccgggcggcctcgtagcggggccccggatccccgagtggcggccggagcctcgaaaagagattctcagcgctgattttgagatgatgggcttgggaaacgggcgtcgcagcatgaagtcgccgcccctcgtgctggccgccctggtggcctgcatcatcgtcttgggcttcaactactggattgcgagctcccggagcgtggacctccagacacggatcatggagctggaaggcagggtccgcagggcggctgcagagagaggcgccgtggagctgaagaagaacgagttccagggagagctggagaagcagcgggagcagcttgacaaaatccagtccagccacaacttccagctggagagcgtcaacaagctgtaccaggacgaaaaggcggttttggtgaataacatcaccacaggtgagaggctcatccgagtgctgcaagaccagttaaagaccctgcagaggaattacggcaggctgcagcaggatgtcctccagtttcagaagaaccagaccaacctggagaggaagttctcctacgacctgagccagtgcatcaatcagatgaaggaggtgaaggaacagtgtgaggagcgaatagaagaggtcaccaaaaaggggaatgaagctgtagcttccagagacctgagtgaaaacaacgaccagagacagcagctccaagccctcagtgagcctcagcccaggctgcaggcagcaggcctgccacacacagaggtgccacaagggaagggaaacgtgcttggtaacagcaagtcccagacaccagcccccagttccgaagtggttttggattcaaagagacaagttgagaaagaggaaaccaatgagatccaggtggtgaatgaggagcctcagagggacaggctgccgcaggagccaggccgggagcaggtggtggaagacagacctgtaggtggaagaggcttcgggggagccggagaactgggccagaccccacaggtgcaggctgccctgtcagtgagccaggaaaatccagagatggagggccctgagcgagaccagcttgtcatccccgacggacaggaggaggagcaggaagctgccggggaagggagaaaccagcagaaactgagaggagaagatgactacaacatggatgaaaatgaagcagaatctgagacagacaagcaagcagccctggcagggaatgacagaaacatagatgtttttaatgttgaagatcagaaaagagacaccataaatttacttgatcagcgtgaaaagcggaatcatacactctgaattgaactggaatcacatatttcacaacagggccgaagagatgactataaaatgttcatgagggactgaatactgaaaactgtgaaatgtactaaataaaatgtacatctgaagatgattattgtgaaattttagtatgcactttgtgtaggaaaaaatggaatggtcttttaaacagcttttgggggggtactttggaagtgtctaataaggtgtcacaatttttggtagtaggtatttcgtgagaagttcaacaccaaaactggaacatagttctccttcaagtgttggcgacagcggggcttcctgattctggaatataactttgtgtaaattaacagccacctatagaagagtccatctgctgtgaaggagagacagagaactctgggttccgtcgtcctgtccacgtgctgtaccaagtgctggtgccagcctgttacctgttctcactgaaaagtctggctaatgctcttgtgtagtcacttctgattctgacaatcaatcaatcaatggcctagagcactgactgttaacacaaacgtcactagcaaagtagcaacagctttaagtctaaatacaaagctgttctgtgtgagaattttttaaaaggctacttgtataataacccttgtcatttttaatgtacaaaacgctattaagtggcttagaatttgaacatttgtggtctttatttactttgcttcgtgtgtgggcaaagcaacatcttccctaaatatatattaccaagaaaagcaagaagcagattaggtttttgacaaaacaaacaggccaaaagggggctgacctggagcagagcatggtgagaggcaaggcatgagagggcaagtttgttgtggacagatctgtgcctactttattactggagtaaaagaaaacaaagttcattgatgtcgaaggatatatacagtgttagaaattaggactgtttagaaaaacaggaatacaatggttgtttttatcatagtgtacacatttagcttgtggtaaatgactcacaaaactgattttaaaatcaagttaatgtgaattttgaaaattactacttaatcctaattcacaataacaatggcattaaggtttgacttgagttggttcttagtattatttatggtaaataggctcttaccacttgcaaataactggccacatcattaatgactgacttcccagtaaggctctctaaggggtaagtaggaggatccacaggatttgagatgctaaggccccagagatcgtttgatccaaccctcttattttcagaggggaaaatggggcctagaagttacagagcatctagctggtgcgctggcacccctggcctcacacagactcccgagtagctgggactacaggcacacagtcactgaagcaggccctgtttgcaattcacgttgccacctccaacttaaacattcttcatatgtgatgtccttagtcactaaggttaaactttcccacccagaaaaggcaacttagataaaatcttagagtactttcatactcttctaagtcctcttccagcctcactttgagtcctccttggggttgataggaattttctcttgctttctcaataaagtctctattcatctcatgtttaatttgtacgcatagaattgctgagaaataaaatgttctgttcaacttaaaaaaaaaaaaaaaaaa

SEQ ID NO: 121 - protein, 401 aa, Homo sapiens
MMGLGNGRRSMKSPPLVLAALVACIIVLGFNYWIASSRSVDLQTRIMELEGRVRRAAAERGAVELKKNEFQGELEKQREQLDKIQSSHNFQLESVNKLYQDEKAVLVNNITTGERLIRVLQDQLKTLQRNYGRLQQDVLQFQKNQTNLERKFSYDLSQCINQMKEVKEQCEERIEEVTKKGNEAVASRDLSENNDQRQQLQALSEPQPRLQAAGLPHTEVPQGKGNVLGNSKSQTPAPSSEVVLDSKRQVEKEETNEIQVVNEEPQRDRLPQEPGREQVVEDRPVGGRGFGGAGELGQTPQVQAALSVSQENPEMEGPERDQLVIPDGQEEEQEAAGEGRNQQKLRGEDDYNMDENEAESETDKQAALAGNDRNIDVFNVEDQKRDTINLLDQREKRNHTL

SEQ ID NO: 122 - DNA, 514 bp, Homo sapiens
  CDS (23)..(466)
ctttttcgtctgggctgccaacatgccatccagactgaggaagacccggaaacttaggggccacgtgagccacggccacggccgcataggcaagcaccggaagcaccccggcggccgcggtaatgctggtggtctgcatcaccaccggatcaacttcgacaaataccacccaggctactttgggaaagttggtatgaagcattaccacttaaagaggaaccagagcttctgcccaactgtcaaccttgacaaattgtggactttggtcagtgaacagacacgggtgaatgctgctaaaaacaagactggggctgctcccatcattgatgtggtgcgatcgggctactacaaagttctgggaaagggaaagctcccaaagcagcctgtcatcgtgaaggccaaattcttcagcagaagagctgaggagaagattaagagtgttgggggggcctgtgtcctggtggcttgaagccacatggagggagtttcattaaatgctaactacttttaaaaa

SEQ ID NO: 123 - protein, 148 aa, Homo sapiens [sequence omitted]

SEQ ID NO: 124 - DNA, 2062 bp, Homo sapiens
  CDS (335)..(1717)
gtcagtccctcctgtagccgccgccgccgccgcccgccgcccctctgccagcagctccggcgccacctcgggccggcgtctccggcgggcgggagccaggcgctgacgggcgcggcgggggcggccgagcgctcctgcggctgcgactcaggctccggcgtctgcgcttccccatggggctggcctgcggcgcctgggcgctctgagattgtcactgctgttccaagggcacacgcagagggatttggaattcctggagagttgcctttgtgagaagctggaaatatttctttcaattccatctcttagttttccataggaacatcaagaaatcatgaacaactttggtaatgaagagtttgactgccacttcctcgatgaaggttttactgccaaggacattctggaccagaaaattaatgaagtttcttcttctgatgataaggatgccttctatgtggcagacctgggagacattctaaagaaacatctgaggtggttaaaagctctccctcgtgtcacccccttttatgcagtcaaatgtaatgatagcaaagccatcgtgaagacccttgctgctaccgggacaggatttgactgtgctagcaagactgaaatacagttggtgcagagtctgggggtgcctccagagaggattatctatgcaaatccttgtaaacaagtatctcaaattaagtatgctgctaataatggagtccagatgatgacttttgatagtgaagttgagttgatgaaagttgccagagcacatcccaaagcaaagttggttttgcggattgccactgatgattccaaagcagtctgtcgtctcagtgtgaaattcggtgccacgctcagaaccagcaggctccttttggaacgggcgaaagagctaaatatcgatgttgttggtgtcagcttccatgtaggaagcggctgtaccgatcctgagaccttcgtgcaggcaatctctgatgcccgctgtgtttttgacatgggggctgaggttggtttcagcatgtatctgcttgatattggcggtggctttcctggatctgaggatgtgaaacttaaatttgaagagatcaccggcgtaatcaacccagcgttggacaaatactttccgtcagactctggagtgagaatcatagctgagcccggcagatactatgttgcatcagctttcacgcttgcagttaatatcattgccaagaaaattgtattaaaggaacagacgggctctgatgacgaagatgagtcgagtgagcagacctttatgtattatgtgaatgatggcgtctatggatcatttaattgcatactctatgaccacgcacatgtaaagccccttctgcaaaagagacctaaaccagatgagaagtattattcatccagcatatggggaccaacatgtgatggcctcgatcggattgttgagcgctgtgacctgcctgaaatgcatgtgggtgattggatgctctttgaaaacatgggcgcttacactgttgctgctgcctctacgttcaatggcttccagaggccgacgatctactatgtgatgtcagggcctgcgtggcaactcatgcagcaattccagaaccccgacttcccacccgaagtagaggaacaggatgccagcaccctgcctgtgtcttgtgcctgggagagtgggatgaaacgccacagagcagcctgtgcttcggctagtattaatgtgtagatagcactctggtagctgttaactgcaagtttagcttgaattaagggatttggggggaccatgtaacttaattactgctagttttgaaatgtctttgtaagagtagggtcgccatgatgcagccatatggaagactaggatatgggtcacacttatctgtgttcctatggaaactatttgaatatttgttttatatggatttttattcactcttcagacacgctactcaagagtgcccctcagctgctgaacaagcatttgtagcttgtacaatggcagaatgggccaaaagcttagtgttgtgacctgtttttaaaataaagtatcttgaaataattaggc

SEQ ID NO: 125 - protein, 461 aa, Homo sapiens
MNNFGNEEFDCHFLDEGFTAKDILDQKINEVSSSDDKDAFYVADLGDILKKHLRWLKALPRVTPFYAVKCNDSKAIVKTLAATGTGFDCASKTEIQLVQSLGVPPERIIYANPCKQVSQIKYAANNGVQMMTFDSEVELMKVARAHPKAKLVLRIATDDSKAVCRLSVKFGATLRTSRLLLERAKELNIDVVGVSFHVGSGCTDPETFVQAISDARCVFDMGAEVGFSMYLLDIGGGFPGSEDVKLKFEEITGVINPALDKYFPSDSGVRIIAEPGRYYVASAFTLAVNIIAKKIVLKEQTGSDDEDESSEQTFMYYVNDGVYGSFNCILYDHAHVKPLLQKRPKPDEKYYSSSIWGPTCDGLDRIVERCDLPEMHVGDWMLFENMGAYTVAAASTFNGFQRPTIYYVMSGPAWQLMQQFQNPDFPPEVEEQDASTLPVSCAWESGMKRHRAACASASINV

SEQ ID NO: 126 - DNA, 3414 bp, Homo sapiens; identical to SEQ ID NO: 11
  CDS (321)..(1322)

SEQ ID NO: 127 - protein, 334 aa, Homo sapiens; identical to SEQ ID NO: 12

SEQ ID NO: 128 - DNA, 594 bp, Homo sapiens
  CDS (34)..(507)
ctgcccctttctttttttcaggcggccgggaagatggcggacattcagactgagcgtgcctaccaaaagcagccgaccatctttcaaaacaagaagagggtcctgctgggagaaactggcaaggagaagctcccgcggtactacaagaacatcggtctgggcttcaagacacccaaggaggctattgagggcacctacattgacaagaaatgccccttcactggtaatgtgtccattcgagggcggatcctctctggcgtggtgaccaagatgaagatgcagaggaccattgtcatccgccgagactatctgcactacatccgcaagtacaaccgcttcgagaagcgccacaagaacatgtctgtacacctgtccccctgcttcagggacgtccagatcggtgacatcgtcacagtgggcgagtgccggcctctgagcaagacagtgcgcttcaacgtgctcaaggtcaccaaggctgccggcaccaagaagcagttccagaagttctgaggctggacatcggcccgctccccacaatgaaataaagttattttctcattccaaaaaaaaaaaaaaaaaaaaaaaaaaaaaaaa

SEQ ID NO: 129 - protein, 158 aa, Homo sapiens [sequence omitted]

SEQ ID NO: 130 - DNA, 11283 bp, Homo sapiens
  CDS (145)..(3138)
ggcgggaggagtaaagatggcggcgcgagggtctccgccctctgctccgggctgaagcgctctgagagaggcggcagcggcaactcgagccccaacagtaatttagtgttggtagttttggcagcagctgccgaggccggagcaatggcggaactggagcacctaggagggaagcgggcagagtcggcgcgaatgcggcgggcagagcagcttcggcgctggcggggctcgctgacagagcaggagcctgcggagcgacgaggcgcggggcggcagccgctgaccaggcgcgggagccccagggtccgcttcgaggacggtgctgtctttctggccgcctgctctagcggggacaccgacgaggtgagaaagcttctggcaagaggtgctgatatcaacacggtcaacgtggacggcttgacagccctgcaccaggcatgtattgatgaaaatttggacatggtgaagtttctggtggagaacagagccaatgtaaaccagcaagacaacgagggctggacaccccttcatgcagcagcttcctgtggctatctcaacatagcagagtatttcattaatcacggagccagtgtaggtattgtcaatagtgaaggtgaagttccctctgaccttgcagaagagccagccatgaaggatcttcttctggagcaagtaaagaagcaaggaattgatctagagcagtcaagaaaagaagaagagcagcagatgttgcaggatgcccgccagtggctcaacagtgggaaaatagaggatgtgaggcaggctcgctcaggggctacagcccttcatgtggctgctgccaagggctactctgaagtcctcagacttttaattcaggctggctatgaactcaatgttcaggattatgatggctggactcccctccatgctgctgcacactggggagtgaaggaggcttgctccatcctggcagaagcactttgtgacatggatattcgaaataaactgggccagacaccatttgatgtggctgatgagggtctcgtggagcatttggagttgctccagaagaagcagaatgtgcttcgaagtgaaaaggagacacggaataaactcattgagtcagatctgaacagcaagattcagagtgggttctttaagaacaaagagaagatgctctatgaggaggagacacctaagtcccaagaaatggaggaagaaaataaagaatctagtagctccagctcagaggaggaggaaggtgaagatgaagcttctgagtcagaaactgagaaggaggcagataaaaagccagaagcctttgtcaatcattccaactctgaaagcaagagtagtatcacagagcagataccagcaccagctcaaaataccttctctgcctcttctgctaggaggttctcttctggcctttttaacaagccagaagagcccaaagatgaatctccttcttcatggagattgggactgagaaaaactggcagccacaacatgctgagtgaggtggccaattccagggaacctataagggaccgaggctcttccatctatcgctcctcttcaagccctcgaatttctgctctactggacaacaaagataaggagagagaaaacaaaagctatattagttcactagcaccccggaagctcaacagcacaagtgatattgaagaaaaggagaacagagaatcagctgttaatctagtgaggagtggctcctatacccggcagctatggagggatgaagcaaaaggaaatgaaatcccacagacaattgctccctccacctatgtatcaacttacttgaaaaggactcctcacaaatcccaggccgacacaacagcagagaaaacagcagacaatgtctcttctagcaccccgctctgtgtgatcaccaatcgccctcttcctagcactgccaatggggttacagctactcctgtgctctccattactggaacagattcctctgtggaagccagggagaagaggaggtcctatctgactcctgtacgggatgaggaagcagagtctttacggaaagcacgctccagacaagctcggcagacacgaaggtctactcaaggtgtcaccctaacagaccttcaagaagcagaaaggacattcagccggtcgagggcagagaggcaagctcaggagcagcctcgtgagaagcccacagacactgaagggcttgaggggagccctgagaagcatgagccctcagcagttccagcaacagaagctggggagggccagcagccctggggcaggagtctggatgaagagcctatctgtcatcgcctgaggtgcccagctcagccagacaaacccaccacgccagcatctccttctacgtcaagaccctcactctacaccagttcccacctgctatggacaaatagattttcagtccctgattctgagagttcagagactaccacaaacactacaactgcaaaggaaatggacaaaaatgagaatgaagaagcagatttggatgagcagtcctctaagaggctgtccatccgagagaggaggcggcccaaggaacgacgaagaggcacaggcatcaatttctggacaaaggatgaggatgaaactgatggctctgaagaggtcaaagaaacgtggcatgaaagactttctaggttggaatcgggaggtagtaatcctacaaccagtgattcttacggtgaccgggcttcagcaagagcccgtcgggaggcccgggaggcccgcctagccaccctgaccagccgtgtagaagaagacagcaacagagattataaaaaactctatgagagtgctctgactgaaaaccaaaaactgaaaacaaaacttcaggaagcccagctagagctagcagatataaagtccaagcttgagaaggtggcccagcagaaacaagaaaagacctctgaccgatcatcagtgctggagatggagaaacgggagaggcgagccttggagcgcaaaatgtcagaaatggaggaagaaatgaagaacctccaccagctaaaacagattcaaaccttgaagcagatgaacgagcaactgcaggctgagaacagggccctgacccgagtggtggccagactctcggagtccatcgagtcctcggacacccaggagctctagttcttgcccctactctccaactcacttccctcctccactactccaggtgttaacagaactgaaatccgacaaccagaggctgaaagatgaaaatggtgccctcatcagagtcatcagcaaactgtccaagtaggctaggctccagatttatgaggaaagaaagggacagcatttgctgcccccacccctcttttccagtccttgccttccaaccaaaagaaatggatgttttggtggaaggacacttctttctatcaccctcttcagtcacctctatacactctacattttctctgcactttcaatgccctgttcttccaaacccctatcccaagttttatgacagttttaattgaagcatgattgtggtaattcgagccatctggagaatgctctggggagtacaccaggctcagctgtggacccctcaacttcctgctgctcagctactttgtccacattggatttggtccaaacatgtaagacttctaccctaatcagtatccttcagctttttacattaacccagtgtcctctgatataggtgagtcttgtggtagccactccaggatcctgattggggtgccaagagaaacagcaggatgttgaattgatcatcagatgccctctggaatggttagcatccaaggtgacagtgactgcattgaggcgctctattcttcttcacctctcaggaactgacttttattttttctatcaacacccagtaatctccctaactagttttaacccttattcctccctcatacctagccatttctccaaggcgcaaatggccctggcttcatttattcctttcctttctatccttttatatttttcccttccccaccccctcactcaatggtataaaagctaggacagagcacctgacctcagttgtctttggccattgtgggaagtcattattctggagacaagaaaatcatcactctggtgccttggtggcagcaccactgcctgctccctggaaggtagactatggcataagtgtcagctcattgttttcgtctcccacttatcttcccccttcaaagtgattttctttataagaaaatttgggctctgaatactccattctgcctcacttccttgaccttgttttcctctcttcgccctgacacctgcttctaatgagaaatgaagtcagtgcaaggaggaatgagaggtggggaggggagattgttgagagatggactaggaagtggaagcaggctggaaagacacatatggcgaaagtcaagtatctgaggccacttgcaacattgtgacaaagaagatggaagatagcagcctactgggctgtgagaatagtggtgaatttgattatttccagtggttagatttagcagagagatttactttcttagaaattaataggggaaatggcacttaatagaggtttaatggaatgaagtactttcaacccattgatgagagtcatggaagtttagagtggcaagacccagaggtcattaggtccagctttctattattgtgtcacagggacccctgctaccacagctttcacccatgggcatggtcaggtagcctctggtggctatgcatttattactcaaaagttgggcaactctaataacgagagagtttttcctcatatcagctgaagtctgcctgtggattctccttgtagtccagatctactatctgcaactctttaacggcacttgagatatgtgcagtgggtggtctccccctcagtcttactttgagctgctgttactctagtcctttaagtcattcctcatatggcatgcttttcttacctgtcacatcttggccatcctcctctagacaaaaccagcctttaaaatatcatgtccaggcctggaaagaatacaaatccagtgcaaaattaaaccattagttcttgatgataacctagcattaatacttacagtattttctttttgtaggagttttatcccttggttcacttgagtgtgcaagtcattaaatcctcatcattttagggttgccagtgatattcagtgtttagagtggttcattcccttaatatatactacctctgtctgttaattctttcctaacatgacatgtagctctccatggtcctccctctgaaacaccacatgctgtttaaactagaagctgtaattcaagatcccaattccaccaggtgcagtggctcatgcctgtaatcccagcacttcaggaggccgaggtggacagatcacgaggtcaggagttcgagaccatcctggctaacacggtgaaacccaatctctactaaaaatacaaaaaattagccaggcgtggtggcaggcgcctgtagtcccagctactcaggaggctgaggcaggagaatggcgtgaacccgggaggcggagcttgcagtgagccttgatcacgccactgcactccagcctgggtgacagagcaagactccatctcaaaaaaaataataataataaataaataaaaaatcccaattacagaacaggagatatgtttcctctgacaaaaccccatttttagagtgtataaaattctgtctttcatttccaaccatttttcaagagaagctgctactatcttgagacttcgtattatcatgggagtactgtaagttcagttctcagggaatgctaaattagagtaataagttttatatccttcattctgggagaggaaatcaacataaggtgttgactaattgattatcctggaacattttgaatattggggaaggaagatgatacttctttctcaagaaaagaaaattggattattaggaatacatcttgacccttttccactcaatagaccagggaaaggggttacagagagcctcctcagatctgtttgtgcctttcaaaagtactgggggcagattctcaaaactcttagattggtgttgcatccctgccacttcacatgacccttccatgttaaagctgacttttcttgccagaaagttttccttgtgacaagaaatttgcaagcttttcaatctcaggaatactggattctatagccaagaactcatgaaagtaagtgtaaactatcctaggtaatttcaggtactttctcttatgcaattaattttattaactgatttctggtctatctccagagataaaataccattccttcacaactgtattgtctggaagccccatgagatggtaattataggccttctactagccagcagttctctctggatactggcatcagcaggtctcctttttcttgtgctgcttggacaggtacctactgctggcctcttcagtggccacaatcctcagtcctcacctgctggtttggagactcatgagcaccccaggcagctcaagctgaataaatagctgcagacatggccaacaacatggggctcaggtctgtcacttaacttagagtctttacatgaaatatcagaatgggaaagagaatgttcctggtaaaactctgttttcattaatttgttatttttcaaaaaccgagccacacctttggaagtaatgatttggccattccagagattctggggctaaagtttgtttttccagggctgctgatccttttccagatagctccagagtatgatgaccccagccccatcccaatctctagcgaaagggttatgcaaatctcagggtgttgcctctaaagaatctaaagaatagacatgctttgggcttactcagtgtaccagattctctagtgggccattctcatttgatgttccctagaacctccctgtcttccaactgcaggatgtgtttacttctcttctgggcttcccctggtttctgtcctagttcccaccccaagtttaagaagacttagattcatttattgctatctgaggccactagtgagatttcagatctctcttttgcaacattttacccatttcccttccccaaaccatgtgcttattagatggttccactcaggaagcaaggaagctaaaactcaagttaatggtctgtggatcccacgaaagtgtgtgtaaactactgactgtttctccactagaggcatttaattgagccaaagatgatggaagaagaaactctcaaagccatgtactttgttaggtgtctggatttttggcctgtttgcagcctctcctagccacagacagacactgtctcctctcagagaaaggccagtgtttcggtccaggccactggtgagtgtcggcacccttgaggtgggcatggagtgagcagaagaagcctggagaagagagaactatttaaaagtgttgccagttattcagcttccaggcggctttgcacctccaaaggtgcaaaaaggaaaaagaaagcagaaaggattcagcatttaagcagaaagaaaagggaaattctactctaccagatgagccactggttccactggagcttatcagtgaagtaacactgcaggagccctggtatccttccctcagagatatcatcaggggccctcaaaccccattgtttatgccagcactgaccgcactttaagcacacacttaccaatcagaggtcgtgtaattggcctaaatctaggcccagttattactacaaatcttagtcaccatactctctcgcccaggctggagtgcagtggtgtgatctcagctcactgcaacctccacctcccaggctcaagggatcctctcacctcagctcccgagcagctaggactgcaggtgtgcaccaccatgcccagctaatttttgaatttttttgtagagatggggttttgccatgttgcccaggctggtctgaagctgctgggctcaagcaatccacctggctgggcctcccaaagcgataggattacaggcgtaagggcccacgcccagcctaccatactgattttcaaggcagggtctaacccttcataagatgtgagttcttccaacccaataagcaggcagctttgaggacaaaaaggcaacattaaaagataagaccctagaagtcagaacatctgtattccaaggccaccccttctccttttagtcatgtgactttgggcaggtcaccctccctgtctgtaaaatgaggttggactggataatctttatgtgccctttccttttggcttaaaattctgtgatttattcattcttaggaagatcagcatatttattgggatttctgcttcaaaaattctttctaacctcaaaaatccaagtccagaattttttgttttcttctggatttaaactgtttaatatgagcacatcaaggttgacttctcatcctttttgggaagtgaatttaatattgagggtaattgaatgatgttgcaatggctttccctcctgctggcttggtaagaatattaaagcctgcagaggtggaaattggagctcatggagaaatggatagaaagcaatttgttgcaggcagcctttggacaagttgttttaataggaaatagacctgctgcttcataggtttcctcaaccacctttcctcagctttcttaaaatgggatctacattggctcttcacacccaaatagcagactaatcgtttttctgcttagcaccgtctggttcattgtcttgaactctgccttacagcagcaagaaaattttcctcgacaagaacctcaatctttagttccattgagctccccctctggattttggacttaccagaagtaggaggttctgataccattcaagatggtctttccttcaaagcaggtctgaagaggagactaccaaagcagtgtttacaaacccagagtccacacaaccatattgcatagaacagcacttggctttcacaagcctcctacaggacctggtgtaattggagtgaaagggcagagaccctggaagtggaggtggctgtgtgctgcgatgggaagaaggcagaaggcccaggggctttggacatagagcagggtggaagctgcaagtactgggaaggaagagagtttcacagaaacaaagctttgtcacacagaaatgagttctgtctcactggtgacttcatccctcaggctccagctgagcagagattttaatcagcttccttaatgggtattgacactgctcaggaagcagtagaccctgtcagggacagctattgatcttttgtgttctgattagattggaaaatagatcaacttcattgtagtccaggaactgttggtcacagctactaggaatgaggtgatttctgagggctgagaaaaaacacagaatcttggccagcagccagcagctgcatggtgaaagatgcattcacttctcctttgagagttggggttgagggcaaacatagaacccaggtttggcttacaacccagtgtcccggaagccctccttcgggagaactgtaagtaagaggtgggtgtgtctaaagacaataccattaatgaatgttctggccttacctaaaaaggtttagcaatttggggataactcttggatctagcttatgtgcgttcacatgcacatttgctagcccagagcttttaaaatgaggtctggcatatacttgattacaaatgaaaactcagaaaccaattttatttattaaatcatatcttttgtttttccccctcccttctaatcccccaaaggacctatttgagctgttccccaattcatctgcttattttggaccatgaatctgccagagtgatattttctgttatttctcctccaaatttttccctgatgtttccaataaagatttacttgggtggccccttaaggtgacatcaggatgctcttatgtccttccagaataagcatacacttcactcctctccctttcatctccctctgcattcttaattccttgcttttctcacttggagccgagggtgctttagagaggtggttttccatgaatcagccaagattcctgtagaagttgggtataccaaccaccaccaccaccgccccctattccagtttcaaagctcctcggctatgctaatgtcccctcagagatgaggtttgacttttaggcccgtatgactcctccatagcctggccaaggagaccatgagtagccatgtctggtttactctttatcctgagactgtttatagcttaaaacagaagtgtgtcttcccagcacaaacctaatcaatcagtgtatcagtgcatctggtggcaacagctcagcccattcaaagagcaaggattcaggaaaggcacactgatggtggggagcctcttaagagcctctaatgttctcccaaaaccagagttgagagtcggagtgccagtcgtcggggcccactattcctgaataagggacatgcaagggccagaagtagcttgactctcgcctaaatatctgtgcctttgcctgtcctttctcccactctactgaaacccggaacagattcccgcttgccttctgatgaagagaggttaggtaaagagagtttggaggaaaaaagacaccaggaggcaggctgcggggtaggagagggttctgagaggaggcagcaatccagaatacctccttttctagccagcatcccttgaacttttgaaaggttgtgcctaccactggctggcacaccagggcaatgatttccctgcagaaggaaggaaagaatgtttcacccttgcatccttcttggagaagctacagcctgtgctcagttgagtggttcacactcagactttggctttatggttttccttcctccttgtctttgccctgaccttgatcaacaggggtgaaaagaaccaccctgaggtttccatgcctctcccattttagtggtagcattttgtgtctttactccacccttcaccctagttccaccaaggttcacacaccagatgtaactgtttttcagctgagttgtatggattaacttcagtccactgtaaatacacctgggatggggtggggttggggttgtttagggagaagcagccagacttgctttgtgaactgaatgtatttttatgcaattttgagtggcctttcaaccctaagatgaatggttttgttttactggttgttgttatatagttttgagtattctgtgtttgaaagtttgggaataataatattcacttctatatgatgcctgtaaacacaacagtatttataaatgagtaaataaaactgtgttttaactttg

SEQ ID NO: 131 - protein, 998 aa, Homo sapiens
MAELEHLGGKRAESARMRRAEQLRRWRGSLTEQEPAERRGAGRQPLTRRGSPRVRFEDGAVFLAACSSGDTDEVRKLLARGADINTVNVDGLTALHQACIDENLDMVKFLVENRANVNQQDNEGWTPLHAAASCGYLNIAEYFINHGASVGIVNSEGEVPSDLAEEPAMKDLLLEQVKKQGIDLEQSRKEEEQQMLQDARQWLNSGKIEDVRQARSGATALHVAAAKGYSEVLRLLIQAGYELNVQDYDGWTPLHAAAHWGVKEACSILAEALCDMDIRNKLGQTPFDVADEGLVEHLELLQKKQNVLRSEKETRNKLIESDLNSKIQSGFFKNKEKMLYEEETPKSQEMEEENKESSSSSSEEEEGEDEASESETEKEADKKPEAFVNHSNSESKSSITEQIPAPAQNTFSASSARRFSSGLFNKPEEPKDESPSSWRLGLRKTGSHNMLSEVANSREPIRDRGSSIYRSSSSPRISALLDNKDKERENKSYISSLAPRKLNSTSDIEEKENRESAVNLVRSGSYTRQLWRDEAKGNEIPQTIAPSTYVSTYLKRTPHKSQADTTAEKTADNVSSSTPLCVITNRPLPSTANGVTATPVLSITGTDSSVEAREKRRSYLTPVRDEEAESLRKARSRQARQTRRSTQGVTLTDLQEAERTFSRSRAERQAQEQPREKPTDTEGLEGSPEKHEPSAVPATEAGEGQQPWGRSLDEEPICHRLRCPAQPDKPTTPASPSTSRPSLYTSSHLLWTNRFSVPDSESSETTTNTTTAKEMDKNENEEADLDEQSSKRLSIRERRRPKERRRGTGINFWTKDEDETDGSEEVKETWHERLSRLESGGSNPTTSDSYGDRASARARREAREARLATLTSRVEEDSNRDYKKLYESALTENQKLKTKLQEAQLELADIKSKLEKVAQQKQEKTSDRSSVLEMEKRERRALERKMSEMEEEMKNLHQLKQIQTLKQMNEQLQAENRALTRVVARLSESIESSDTQEL

SEQ ID NO: 132 - DNA, 1137 bp, Homo sapiens
  CDS (276)..(890)
ctccctgtcgccgcggaggggcgggggcaggacgcgcaactccggccggagctgtccggggtcgtgagccggccccgccttggtggcggcgccccctcgcggtccagaggcagacgcatcgggtgggctcgggtctccagcccggccgggaggagggaccgggtctgcggagcggggactcggggcctcggcggggcgcgcacacgcaggcggggcggcccggggtgcggggcctctgcgcggctgaccaggctcccagagcgtcagcgccgcccatggccgagccgctccagccagaccccggggcggccgaggacgcggcggcccaagctgtggagacgccgggctggaaggccccggaggacgccggcccccagcccggaagttatgagatccgacactatggaccagccaagtgggtcagcacgtccgtggagtctatggactgggattcagccatccagacgggctttacgaaactgaacagctacattcaaggcaaaaacgagaaagagatgaaaataaagatgacagctccagtgacaagctacgtggagcctggttcaggtccttttagtgagtctaccattaccatttccctgtatattccctctgaacagcaatttgatccacccaggcctttagagtcagatgtcttcattgaagatagagccgaaatgactgtgtttgtacggtctttcgatggattttctagtgcccaaaagaatcaagaacaacttttgacattagcaagcattttaagggaagatggaaaagttttcgatgagaaggtttactacactgcaggctacaacagtcctgtcaaattgcttaatagaaataatgaagtgtggttgattcaaaaaaatgaacccaccaaagaaaacgaatgagaaaaatgaaaggaagttctgctgtcagaggcaaaacatctgtttatcatagacatcaacatgacctataagtaaagtgcgtgtctagtgtcttctattgagagtactactattaattaagcttatttccaatgtgcctttttaatgcttgaagttttatctacatacacaggtaacagaggacagtagtctgtaaacatataaatcggtcataactatcgtggtctttatttctgtgaggatc

SEQ ID NO: 133 - protein, 205 aa, Homo sapiens
MAEPLQPDPGAAEDAAAQAVETPGWKAPEDAGPQPGSYEIRHYGPAKWVSTSVESMDWDSAIQTGFTKLNSYIQGKNEKEMKIKMTAPVTSYVEPGSGPFSESTITISLYIPSEQQFDPPRPLESDVFIEDRAEMTVFVRSFDGFSSAQKNQEQLLTLASILREDGKVFDEKVYYTAGYNSPVKLLNRNNEVWLIQKNEPTKENE

SEQ ID NO: 134 - DNA, 3875 bp, Homo sapiens
  CDS (1706)..(3394)
ggcacgagggtaaatatggcataagttaataacacttttccccaaaatggtgctttggatttgaaaagggtctgatggggagaaggagaacgtatcatcctagcttcctctcttaataaacctagaaaaacgggtagtaaactgtggatagtcaggaaaacacccagcaagggacacagctgtcaggaaatgaatcttccccccaacccccaccatgcagatggatagacagaatctttcctgactagtcattaggatcaggggcctctgttggatttgtgtttcttgaagaatagctggcagagtggtataaaagacacgaatatctcctggtctataaggatactctgatttggggtttgcatttttcatggtttttatttcctgttccccctggagttttccattagtgagtttttgtgcaaggatcttatttgtgatgccttccctcccctagaaagattttgtgcaatatattaaatggggacagaattctaaatggataaaacaatggctggttctagccctgagtgacagtcttaaggctagatccttcccatagtatcatctgtcctctggaatgactctcctgtccctaaaggggttaagagagagatcacctagaaatccctctggacacttgtgggttctttagggtttgagtttcttcttccccttgagcttcagagaggagagttggcatggttaaatctgaatggttacctcactgctgaaaacccagaggggcgtggcacactcgcttgtgtggaaaagcctctaaatgcatcccttcctttctttcctgcttcctttgccttacaattgaagcagcccgtggtaccatcacagtatgcagagacttcctcacctttcatatctagggaccacccccgatgcattggtgagggtgggcacttataaatgcctgctattgttaagccattccagcctcttcctctgaatagaccagacgccctttcacttagttcagtgccagtccttttgccttcccaaccctgctgttaggcctgctgttccctttgctcttgattaggagagatggaaggagatgagctcccataactgaattggcctttggttcatgttttctccccatatgtatatatgccatatgtgaatatgccatatatatgtgccaacaaatctatctacgttgttcttttcaaattagcacgcagataggaattttgagtttcttcttcttttagtaactagtataacaagcactggtatttttgtacaaaaaagaaaaacaaaagattgactattgtggtctgcatgacataaacaaacaaatggtgatatcaaagcaacgtataccccagtccagtgtgtgttgccataatttgcaattcagcttaacagtgcacccaatctatatttgcattttgatattatttaagctctatgtacaaggttttgcatgtatttatatggttcttagggaaaaaaaatgctataaactgcaaatctgaaattcaaatgtgttgttccactgagaccagaagaagaagaggagttttaaaagggataatttgttggagccaataaagctttttgctgatgaacagaaaccaatactgctgtgcactgagaataaaaactcatgcccacttgtaaaaaaaaaaaaaaaaaaaaactcgagactagttctctccttcggttacccacagtctttcgccagatgagaccggtgtccagggtactggctcctcatctcacccgggcttatgccaaagatgtaaaatttggtgcagatgcccgagccttaatgcttcaaggtgtagaccttttagccgatgctgtggccgttacaatggggccaaagggaagaacagtgattattgagcagagttggggaagtcccaaagtaacaaaagatggtgtgactgttgcaaagtcaattgacttaaaagataaatacaagaacattggagctaaacttgttcaagatgttgccaataacacaaatgaagaagctggggatggcactaccactgctactgtactggcacgctctatagccaaggaaggcttcgagaagattagcaaaggtgctaatccagtggaaatcaggagaggtgtgatgttagctgttgatgctgtaattgctgaacttaaaaagcagtctaaacctgtgaccacccctgaagaaattgcacaggttgctacgatttctgcaaacggagacaaagaaattggcaatatcatctctgatgcaatgaaaaaagttggaagaaagggtgtcatcacagtaaaggatggaaaaacactgaatgatgaattagaaattattgaaggcatgaagtttgatcgaggctatatttctccatactttattaatacatcaaaaggtcagaaatgtgaattccaggatgcctatgttctgttgagtgaaaagaaaatttctagtatccagtccattgtacctgctcttgaaattgccaatgctcaccgtaagcctttggtcataatcgctgaagatgttgatggagaagctctaagtacactcgtcttgaataggctaaaggttggtcttcaggttgtggcagtcaaggctccagggtttggtgacaatagaaagaaccagcttaaagatatggctattgctactggtggtgcagtgtttggagaagagggattgaccctgaatcttgaagacgttcagcctcatgacttaggaaaagttggagaggtcattgtgaccaaagacgatgccatgctcttaaaaggaaaaggtgacaaggctcaaattgaaaaacgtattcaagaaatcattgagcagttagatgtcacaactagtgaatatgaaaaggaaaaactgaatgaacggcttgcaaaactttcagatggagtggctgtgctgaaggttggtgggacaagtgatgttgaagtgaatgaaaagaaagacagagttacagatgcccttaatgctacaagagctgctgttgaagaaggcattgttttgggagggggttgtgccctccttcgatgcattccagccttggactcattgactccagctaatgaagatcaaaaaattggtatagaaattattaaaagaacactcaaaattccagcaatgaccattgctaagaatgcaggtgttgaaggatctttgatagttgagaaaattatgcaaagttcctcagaagttggttatgatgctatggctggagattttgtgaatatggtggaaaaaggaatcattgacccaacaaaggttgtgagaactgctttattggatgctgctggtgtggcctctctgttaactacagcagaagttgtagtcacagaaattcctaaagaagagaaggaccctggaatgggtgcaatgggtggaatgggaggtggtatgggaggtggcatgttctaactcctagactagtgctttacctttattaatgaactgtgacaggaagcccaaggcagtgttcctcaccaataacttcagagaagtcagttggagaaaatgaagaaaaaggctggctgaaaatcactataaccatcagttactggtttcagttgacaaaatatataatggtttactgctgtcattgtccatgcctacagataatttattttgtatttttgaataaaaaacatttgtacattcctgatactgggtacaagagccatgtaccagtgtactgctttcaacttaaatcactgaggcatttttactactattctgttaaaatcaggattttagtgcttgccaccaccagatgagaagttaagcagcctttctgtggagagtgagaataattgtgtacaaagtagagaagtatccaattatgtgacaacctttgtgtaataaaaatttgtttaaagttaaaaaaaaaaaaaaaaaa

SEQ ID NO: 135 - protein, 563 aa, Homo sapiens [sequence omitted]

SEQ ID NO: 136 - DNA, 2845 bp, Homo sapiens
  CDS (230)..(1843)
cctgcctgcccgcctgcttgctctctggctgtgctcctgcttaaagaaatcagtccttcctttccgacttagtcctcgggaagaagtttcagactacaaggtatcattggaacatttcaagatcatcaaatcaaattccacagggattggtgaccaaccagaaggctcagacatctgattgctgacctgtccagacatcatctggtctccctgaacctgaaatcacaccatggatgattttgagcgtcgcagagaacttagaaggcaaaagagggaggagatgcgactcgaagcagaaagaatcgcctaccagaggaatgacgatgatgaagaggaggcagcccgggaacgccgccgccgagcccgacaggaacggctgcggcagaagcaggaggaagaatccttgggacaggtgaccgaccaggtggaggtgaatgcccagaacagtgtgcctgacgaggaggccaagacaaccaccacaaacactcaagtggaaggggatgatgaggccgcattcctggagcgcctggctcggcgtgaggaaagacgccaaaaacgccttcaggaggctctggagcggcagaaggagttcgacccaacaataacagatgcaagtctgtcgctcccaagcagaagaatgcaaaatgacacagcagaaaatgaaactaccgagaaggaagaaaaaagtgaaagtcgccaagaaagatacgagatagaggaaacagaaacagtcaccaagtcctaccagaagaatgattggagggatgctgaagaaaacaagaaagaagacaaggaaaaggaggaggaggaagaggagaagccaaagcgagggagcattggagaaaatcagatcaaagatgaaaagattaaaaaggacaaagaacccaaagaagaagttaagagcttcatggatcgaaagaagggatttacagaagttaagtcgcagaatggagaattcatgacccacaaacttaaacatactgagaatactttcagccgccctggagggagggccagcgtggacaccaaggaggctgagggcgccccccaggtggaagccggcaaaaggctggaggagcttcgtcgtcgtcgcggggagaccgagagcgaagagttcgagaagctcaaacagaagcagcaggaggcggctttggagctggaggaactcaagaaaaagagggaggagagaaggaaggtcctggaggaggaagagcagaggaggaagcaggaggaagccgatcgaaaactcagagaggaggaagagaagaggaggctaaaggaagagattgaaaggcgaagagcagaagctgctgagaaacgccagaagatgccagaagatggcttgtcagatgacaagaaaccattcaagtgtttcactcctaaaggttcatctctcaagatagaagagcgagcagaatttttgaataagtctgtgcagaaaagcagtggtgtcaaatcgacccatcaagcagcaatagtctccaagattgacagcagactggagcagtataccagtgcaattgagggaacaaaaagcgcaaaacctacaaagccggcagcctcggatcttcctgttcctgctgaaggtgtacgcaacatcaagagtatgtgggagaaagggaatgtgttttcatcccccactgcagcaggcacaccaaataaggaaactgctggcttgaaggtaggggtttctagccgcatcaatgaatggctaactaaaaccccagatggaaacaagtcacctgctcccaaaccttctgacttgagaccaggagacgtatccagcaagcggaacctctgggaaaagcaatctgtggataaggtcacttcccccactaaggtttgagacagttccagaaagaacccaagctcaagacgcaggacgagctcagttgtagagggctaattcgctctgttttgtatttatgttgatttactaaattgggttcattatcttttatttttcaatatcccagtaaacccatgtatattatcactatatttaataatcacagtctagagatgttcatggtaaaagtactgcctttgcacaggatcctgtttctaaagaaacccatgctgtgaaatagagacttttctactgatcatcataactctgtatctgagcagtgataccaaccacatctgaagtcaacagaagatccaagtttaaaattgctgcggaatgtgtgcagtatctagaaaaatgaaccgtagtttttgtttttttaaatacagaagtcatgttgtttctgcactttataataaagcatggaagaaattatcttagtaggcaattgtaacactttttgaaagtaacccatttcagatttgaaatactgcaataatggttgtctttaaaaaaaaaaagaatgtactgttaaggtattactttttttcatgctgatgattcatatctaaattacattattatgttagctgacagtggtactgattttttaggttggttgttttgtggatttctttagtagtgatagtagcctgaaccacattttagataactcaattatgtatgtatgtgcatacacatatacaaacacactaatggtagaatgcttttttatgtgctagactattatatttagtagtatgtcattgtaactagccaatatcacagcttttgaaaaattaaaaaatcatcatcactataatatttcatatttgccaacagaaacatggcagataggtatcaatatgttttcaatgcctgatgacctataagaagaaagtattgaaaagaagagagattagaactgttagaaggagttgaaattttctaaaagacatagtatttagtttataattaaatgcattcttgaagtcc

SEQ ID NO: 137 - protein, 538 aa, Homo sapiens
MDDFERRRELRRQKREEMRLEAERIAYQRNDDDEEEAARERRRRARQERLRQKQEEESLGQVTDQVEVNAQNSVPDEEAKTTTTNTQVEGDDEAAFLERLARREERRQKRLQEALERQKEFDPTITDASLSLPSRRMQNDTAENETTEKEEKSESRQERYEIEETETVTKSYQKNDWRDAEENKKEDKEKEEEEEEKPKRGSIGENQIKDEKIKKDKEPKEEVKSFMDRKKGFTEVKSQNGEFMTHKLKHTENTFSRPGGRASVDTKEAEGAPQVEAGKRLEELRRRRGETESEEFEKLKQKQQEAALELEELKKKREERRKVLEEEEQRRKQEEADRKLREEEEKRRLKEEIERRRAEAAEKRQKMPEDGLSDDKKPFKCFTPKGSSLKIEERAEFLNKSVQKSSGVKSTHQAAIVSKIDSRLEQYTSAIEGTKSAKPTKPAASDLPVPAEGVRNIKSMWEKGNVFSSPTAAGTPNKETAGLKVGVSSRINEWLTKTPDGNKSPAPKPSDLRPGDVSSKRNLWEKQSVDKVTSPTKV

SEQ ID NO: 138 - DNA, 3084 bp, Homo sapiens
  CDS (1254)..(1394)
gggcagacacctcacatggcaaaagcaggggcaacagagagggcaggggtggggggagggtgccacagactttgaaataaccagatttcatgtgaactcggaagaagagctcacttatcaccaaggagatgtcctaagccattcatgagagatccacccacgtgatccaaacacctcctaccaggccccacctccaacacgggggattacatctcaacatgagatttggaggagatatccaaactatactaaattctttacaacttttctgaaatctaaaattgttccaaaataaaaaaggttatttttaaaaccaaaccaaaacataaaaccacctgggagaacccaggtttgaatatcagatctgacactgatataaccggtgttacctgggccagttacttaaactttctcgacctctgtttcctcatatgtaatatgggagtaatttaagacttattcttcaagatgtttatgagaatcaaatgagataatacatgtaaaatcgttagcatagtgcctggcatataattacatggctcagtaaatatcagtactttgtattaagaagtaaatgctcagaagataaagattaaactggttagccagttttcactgttctctgtgcctaaaccattcatttatttaagaaacatgagcatgccttgcaggttaggcctgtgcactgggaaaggccaaccagtgcagcttaagaggcacctattgcaagggaatgtccccagcaggggaccctgagttccccaatgttaaacagagcatctgggtgaaagtggtagttcacttcaccacgtggaaacacatttgtatactaagtcctagcacaattaaaacttcttcctttgaataggctagggttgtttctacagaaagtgtatcgtgttgaattctgaggcagagttcatggaaatcagaggcattgccagggttcttaagtgggggccatggctggatttggagccaactttcagtttgctcaataatgtggtcgaagagttacaggtgagaaaaacgaatgtgcttactgaagaatttctaaatccatggctccctctggcggtcctgccaagaagaacatgacacaattaggacacaattggcatctaacagacaagcctgtgtccctgctgaacaagaaactaggccatggtagaacatccaggctctgtcctaccgcactaacgactgcactaatgatgacattaatgaccattctttttcatcttgactgacagatcattgcccctccggagcgcaaatactctgtctggatcggtggctccatcctggcctctctgtccaccttccagcagatgtggatcagcaaacaggaatacgatgaagccgggccttccattgtccaccgcaaatgcttctaaaacactttcctgctcctctctgtctctagcacacaactgtgaatgtcctgtggaattatgccttcagttcttttccaaatcattcctagccaaagctctgactcgttacctatgtgttttttaataaatctgaaataggctactggtaacttcttgcgttggcctccgatcaatactcgactgataccatttgttaggttgacctcacccgttcaaggatggctcccactagtggttccagctgagcaacatggcaattaggatggatatgtttctcaggcaaagggtagaatcacattacctgaagtggggagctgcacttcggttctgtaaagaggaataatttgagaatacattggagattttaaaaaataacatggattaaagtgtatcaatgggataatctacagtacctcacaacttgcaaagtgattatattactttacactcataaccccagtactggtaacctgatgggtgaaaagaatataattacacacacacacacacgtatatatacacatatacacacatatatatgtatgtgtgtgtgtacatatatatatgtatgtgtgtatatatatatatgtgtgtgtgtgtgtgtgtgtgtgtgtgtattagagataaggtctcactctgtcacccaggctggagtgcaatgatgtaataatagctcattgcagccttgatgcagccttgaacttctaggctcaagcaattctctcctcttgactttccaaaatgctggaattataggcataagcgttgtgcctatatatcttaaaagtcatatctgtatattaaaagtcacacacacacatatagatacatttcccatacatatatacatatatatgtgtgtgacttttaatatacaagatattacttttaatgcatatactatgtattaaacttatatacatatatatacacatacatatatacatatagaaacaggtcaggtctgacttttatgtttattgagggaaacatggattttttaaaaaacatttgagaaacactgccttaaaatctcactacacatctggaccatctgtttcccttctcttgatctatctgtctttgaaaaggatactatggatatattcaggccagaaggaatgagagagagaacaatactttccaaggaccattagcatcaatcatcaggtaagggttttacacatatcatctctcagctgttcttcacaactatctggggaagtattatcagcgcactttataattgaggagacagagattgctctagaaatgcaatgggataggagagctaccaacttccatttgcctgaaagacaaagatataaaaaaacactgaccctgctgttcagggtcttagcctcagagcactcccttgcccaggctgttcaccatcctcagttgctcccaagctgggagctgcttgccctccagtgcatagtgtgtgtcggaagccactggttgtcctgaggagttaaggtggctctgtctgtggcagcacctcactgcagagacctccaggcccaggactgagtgtctgtttggtctagaaaacccgaactcccctagtcttctctggccctgtaacttgcagataattaggattaataccacaaataataagagctgggatgtactggtgcctgccatgaccagagcctgaatcaagctctttatattaggatcc

SEQ ID NO: 139 - protein, 47 aa, Homo sapiens
IIAPPERKYSVWIGGSILASLSTFQQMWISKQEYDEAGPSIVHRKCF

SEQ ID NO: 140 - DNA, 4200 bp, Homo sapiens
  CDS (33)..(3854)
catggtgagtgcctggtgtgacgtctctcaggatgcctgagccggggaagaagccagtctcagcctttagcaagaagccacggtcagtggaagtggccgcaggcagccctgccgtgttcgaggccgagacagagcgggcaggagtgaaggtgcgctggcagcgcggaggcagtgacatcagcgccagcaacaagtacggcctggccacagagggcacacggcatacgctgacagtgcgggaagtgggccctgccgaccagggatcttacgcagtcattgctggctcctccaaggtcaagttcgacctcaaggtcatagaggcagagaaggcagagcccatgctggcccctgcccctgcccctgctgaggccactggagcccctggagaagccccggccccagccgctgagctgggagaaagtgccccaagtcccaaagggtcaagctcagcagctctcaatggtcctacccctggagcccccgatgaccccattggcctcttcgtgatgcggccacaggatggcgaggtgaccgtgggtggcagcatcaccttctcagcccgcgtggccggcgccagcctcctgaagccgcctgtggtcaagtggttcaagggcaaatgggtggacctgagcagcaaggtgggccagcacctgcagctgcacgacagctacgaccgcgccagcaaggtctatctgttcgagctgcacatcaccgatgcccagcctgccttcactggcagctaccgctgtgaggtgtccaccaaggacaaatttgaatgctccaacttcaatctcactgtccacgaggccatgggcaccggagacctggacctcctatcagccttccgccgcacgagcctggctggaggtggtcggcggatcagtgatagccatgaggacactgggattctggacttcagctcactgctgaaaaagagagacagtttccggaccccgagggactcgaagctggaggcaccagcagaggaggacgtgtgggagatcctacggcaggcacccccatctgagtacgagcgcatcgccttccagtacggcgtcactgacctgcgcggcatgctaaagaggctcaagggcatgaggcgcgatgagaagaagagcacagcctttcagaagaagctggagccggcctaccaggtgagcaaaggccacaagatccggctgaccgtggaactggctgaccatgacgctgaggtcaaatggctcaagaatggccaggagatccagatgagcggcagcaagtacatctttgagtccatcggtgccaagcgtaccctgaccatcagccagtgctcattggcggacgacgcagcctaccagtgcgtggtgggtggcgagaagtgtagcacggagctctttgtgaaagagccccctgtgctcatcacgcgccccttggaggaccagctggtgatggtggggcagcgggtggagtttgagtgtgaagtatcggaggagggggcgcaagtcaaatggctgaaggacggggtggagctgacccgggaggagaccttcaaataccggttcaagaaggacgggcagagacaccacctgatcatcaacgaggccatgctggaggacgcggggcactatgcactgtgcactagcgggggccaggcgctgcgtgagctcattgtgcaggaaaagaagctggaggtgtaccagagcatcgcagacctgatggtgggcgcaaaggaccaggcggtgttcaaatgtgaggtctcagatgagaatgttcggggtgtgtggctgaagaatgggaaggagctggtgcccgacagccgcataaaggtgtcccacatcgggcgggtccacaaactgaccattgacgacgtcacacctgccgacgaggctgactacagctttgtgcccgagggcttcgcctgcaacctgtcagccaagctccacttcatggaggtcaagattgacttcgtacccaggcaggaacctcccaagatccacctggactgcccaggccgcataccagacaccattgtggttgtagctggaaataagctacgtctggacgtccctatctctggggaccctgctcccactgtgatctggcagaaggctatcacgcaggggaataaggccccagccaggccagccccagatgccccagaggacacaggtgacagcgatgagtgggtgtttgacaagaagctgctgtgtgagaccgagggccgggtccgcgtggagaccaccaaggaccgcagcatcttcacggtcgagggggcagagaaggaagatgagggcgtctacacggtcacagtgaagaaccctgtgggcgaggaccaggtcaacctcacagtcaaggtcatcgacgtgccagacgcacctgcggcccccaagatcagcaacgtgggagaggactcctgcacagtacagtgggagccgcctgcctacgatggcgggcagcccatcctgggctacatcctggagcgcaagaagaagaagagctaccggtggatgcagctgaacttcgacctgattcaggagctgagtcatgaagcgcggcgcatgatcgagggcgtggtgtacgagatgcgcgtctacgcggtcaacgccatcggcatgtccaggcccagccctgcctcccagcccttcatgcctatcggtccccccagcgaacccacccacctggcagtagaggacgtctctgacaccacggtctccctcaagtggcggcccccagagcgcgtgggagcaggaggcctggatggctacagcgtggagtactgcccagagggctgctcagagtgggtggctgccctgcaggggctgacagagcacacatcgatactggtgaaggacctgcccacgggggcccggctgcttttccgagtgcgggcacacaatatggcagggcctggagcccctgttaccaccacggagccggtgacagtgcaggagatcctgcaacggccacggcttcagctgcccaggcacctgcgccagaccattcagaagaaggtcggggagcctgtgaaccttctcatccctttccagggcaagccccggcctcaggtgacctggaccaaagaggggcagcccctggcaggcgaggaggtgagcatccgcaacagccccacagacaccatcctgttcatccgggccgctcgccgcgtgcattcaggcacttaccaggtgacggtgcgcattgagaacatggaggacaaggccacgctggtgctgcaggttgttgacaagccaagtcctccccaggatctccgggtgactgacgcctggggtcttaatgtggctctggagtggaagccaccccaggatgtcggcaacacggaactctgggggtacacagtgcagaaagccgacaagaagaccatggagtggttcaccgtcttggagcattaccgccgcacccactgcgtggtgccagagctcatcattggcaatggctactacttccgcgtcttcagccagaatatggttggctttagtgacagagcggccaccaccaaggagcccgtctttatccccagaccaggcatcacctatgagccacccaactataaggccctggacttctccgaggccccaagcttcacccagcccctggtgaaccgctcggtcatcgcgggctacactgctatgctctgctgtgctgtccggggtagccccaagcccaagatttcctggttcaagaatggcctggacctgggagaagacgcccgcttccgcatgttcagcaagcagggagtgttgactctggagattagaaagccctgcccctttgacgggggcatctatgtctgcagggccaccaacttacagggcgaggcacggtgtgagtgccgcctggaggtgcgagtgcctcagtgaccaggctggctcctggggatggccaggtacaaccggatgccagccccgtgccaggagcctggagggaagttggggaaacccctccctactgttggatgtatgtgtgacaagtgtgtctcctgtgctgcgatgggggatcagcagggcagttgtcgggcagtcctgagtgggtgttgcacagactggtccacagggctcctgaaggaagcccctggatctttggggtaaaaggagggtggcctcaagaaacaatgtctggggacaggcctttctggcctgctatgtcttcccaatgtttattgggcaataaaagataagtgcagtcacagagaactcactcttc

SEQ ID NO: 141 - protein, 1274 aa, Homo sapiens
MPEPGKKPVSAFSKKPRSVEVAAGSPAVFEAETERAGVKVRWQRGGSDISASNKYGLATEGTRHTLTVREVGPADQGSYAVIAGSSKVKFDLKVIEAEKAEPMLAPAPAPAEATGAPGEAPAPAAELGESAPSPKGSSSAALNGPTPGAPDDPIGLFVMRPQDGEVTVGGSITFSARVAGASLLKPPVVKWFKGKWVDLSSKVGQHLQLHDSYDRASKVYLFELHITDAQPAFTGSYRCEVSTKDKFECSNFNLTVHEAMGTGDLDLLSAFRRTSLAGGGRRISDSHEDTGILDFSSLLKKRDSFRTPRDSKLEAPAEEDVWEILRQAPPSEYERIAFQYGVTDLRGMLKRLKGMRRDEKKSTAFQKKLEPAYQVSKGHKIRLTVELADHDAEVKWLKNGQEIQMSGSKYIFESIGAKRTLTISQCSLADDAAYQCVVGGEKCSTELFVKEPPVLITRPLEDQLVMVGQRVEFECEVSEEGAQVKWLKDGVELTREETFKYRFKKDGQRHHLIINEAMLEDAGHYALCTSGGQALRELIVQEKKLEVYQSIADLMVGAKDQAVFKCEVSDENVRGVWLKNGKELVPDSRIKVSHIGRVHKLTIDDVTPADEADYSFVPEGFACNLSAKLHFMEVKIDFVPRQEPPKIHLDCPGRIPDTIVVVAGNKLRLDVPISGDPAPTVIWQKAITQGNKAPARPAPDAPEDTGDSDEWVFDKKLLCETEGRVRVETTKDRSIFTVEGAEKEDEGVYTVTVKNPVGEDQVNLTVKVIDVPDAPAAPKISNVGEDSCTVQWEPPAYDGGQPILGYILERKKKKSYRWMQLNFDLIQELSHEARRMIEGVVYEMRVYAVNAIGMSRPSPASQPFMPIGPPSEPTHLAVEDVSDTTVSLKWRPPERVGAGGLDGYSVEYCPEGCSEWVAALQGLTEHTSILVKDLPTGARLLFRVRAHNMAGPGAPVTTTEPVTVQEILQRPRLQLPRHLRQTIQKKVGEPVNLLIPFQGKPRPQVTWTKEGQPLAGEEVSIRNSPTDTILFIRAARRVHSGTYQVTVRIENMEDKATLVLQVVDKPSPPQDLRVTDAWGLNVALEWKPPQDVGNTELWGYTVQKADKKTMEWFTVLEHYRRTHCVVPELIIGNGYYFRVFSQNMVGFSDRAATTKEPVFIPRPGITYEPPNYKALDFSEAPSFTQPLVNRSVIAGYTAMLCCAVRGSPKPKISWFKNGLDLGEDARFRMFSKQGVLTLEIRKPCPFDGGIYVCRATNLQGEARCECRLEVRVPQ

SEQ ID NO: 142 - DNA, 3925 bp, Homo sapiens
  CDS (205)..(2166)
acagcacagacagattgacctattggggtgtttcgcgagtgtgagagggaagcgccgcggcctgtatttctagacctgcccttcgcctggttcgtggcgccttgtgaccccgggcccctgccgcctgcaagtcggaaattgcgctgtgctcctgtgctacggcctgtggctggactgcctgctgctgcccaactggctggcaagatgaagctctccctggtggccgcgatgctgctgctgctcagcgcggcgcgggccgaggaggaggacaagaaggaggacgtgggcacggtggtcggcatcgacctggggaccacctactcctgcgtcggcgtgttcaagaacggccgcgtggagatcatcgccaacgatcagggcaaccgcatcacgccgtcctatgtcgccttcactcctgaaggggaacgtctgattggcgatgccgccaagaaccagctcacctccaaccccgagaacacggtctttgacgccaagcggctcatcggccgcacgtggaatgacccgtctgtgcagcaggacatcaagttcttgccgttcaaggtggttgaaaagaaaactaaaccatacattcaagttgatattggaggtgggcaaacaaagacatttgctcctgaagaaatttctgccatggttctcactaaaatgaaagaaaccgctgaggcttatttgggaaagaaggttacccatgcagttgttactgtaccagcctattttaatgatgcccaacgccaagcaaccaaagacgctggaactattgctggcctaaatgttatgaggatcatcaacgagcctacggcagctgctattgcttatggcctggataagagggagggggagaagaacatcctggtgtttgacctgggtggcggaaccttcgatgtgtctcttctcaccattgacaatggtgtcttcgaagttgtggccactaatggagatactcatctgggtggagaagactttgaccagcgtgtcatggaacacttcatcaaactgtacaaaaagaagacgggcaaagatgtcaggaaagacaatagagctgtgcagaaactccggcgcgaggtagaaaaggccaaacgggccctgtcttctcagcatcaagcaagaattgaaattgagtccttctatgaaggagaagacttttctgagaccctgactcgggccaaatttgaagagctcaacatggatctgttccggtctactatgaagcccgtccagaaagtgttggaagattctgatttgaagaagtctgatattgatgaaattgttcttgttggtggctcgactcgaattccaaagattcagcaactggttaaagagttcttcaatggcaaggaaccatcccgtggcataaacccagatgaagctgtagcgtatggtgctgctgtccaggctggtgtgctctctggtgatcaagatacaggtgacctggtactgcttgatgtatgtccccttacacttggtattgaaactgtgggaggtgtcatgaccaaactgattccaaggaacacagtggtgcctaccaagaagtctcagatcttttctacagcttctgataatcaaccaactgttacaatcaaggtctatgaaggtgaaagacccctgacaaaagacaatcatcttctgggtacatttgatctgactggaattcctcctgctcctcgtggggtcccacagattgaagtcacctttgagatagatgtgaatggtattcttcgagtgacagctgaagacaagggtacagggaacaaaaataagatcacaatcaccaatgaccagaatcgcctgacacctgaagaaatcgaaaggatggttaatgatgctgagaagtttgctgaggaagacaaaaagctcaaggagcgcattgatactagaaatgagttggaaagctatgcctattctctaaagaatcagattggagataaagaaaagctgggaggtaaactttcctctgaagataaggagaccatggaaaaagctgtagaagaaaagattgaatggctggaaagccaccaagatgctgacattgaagacttcaaagctaagaagaaggaactggaagaaattgttcaaccaattatcagcaaactctatggaagtgcaggccctcccccaactggtgaagaggatacagcagaaaaagatgagttgtagacactgatctgctagtgctgtaatattgtaaatactggactcaggaacttttgttaggaaaaaattgaaagaacttaagtctcgaatgtaattggaatcttcacctcagagtggagttgaaactgctatagcctaagcggctgtttactgcttttcattagcagttgctcacatgtctttgggtgggggggagaagaagaattggccatcttaaaaagcaggtaaaaaacctgggttagggtgtgtgttcaccttcaaaatgttctatttaacaactgggtcatgtgcatctggtgtaggaagttttttctaccataagtgacaccaataaatgtttgttatttacactggtctaatgtttgtgagaagcttctaattagatcaattacttattttaggaaatttaagactagatactcgtgtgtggggtgaggggagggagtatttggtatgttgggataaggaaacacttctatttaatgcttccagggattttttttttttttttttaaccctcctgggcccaagtgatccttccacctcagtctcccagctaattgagaccacaggcttgttaccaccatgctcggcttttgcattaatctaagaaaaggggagagaagttaatccacatctttactcaggcaaggggcatttcacagtgcccaagagtggggttttcttgaacatacttggtttcctatttccccttatctttctaaaactgcctttctggtggctttttttaaaattattactaatgatgcttttatagctgcttggattctctgagaaatgatggggagtgagtgatcactggtattaactttatacacttggatttcatttgtaactttaggatgtaaaggtatattgtgaaccctagctgtgtcagaatctccatccctgaaatttctcattagtggtactggggtgggatcttggatggtgacattgaaactacactaaatcccctcactatgaatgggttgttaaaggcaatggtttgtgtcaaaactggtttaggattacttagattgtgttcctgaagaaaagagtccaggtaaatggtatgatcaataaaggacaggctggtgctaacataaaatccaatattgtaatcctagcactttgggaggccaaggcgggtggatcacaaggtcaagagatagagaccatctttgccaacatggtgaaactccatctctactgaaaatacaaaaattagctgggcgtggtagtgcaagctgaaggctgaggcaggagaatcactcgaacccgggaggcagaggttgcagtgagccgagatcacaccactgtactccagcccggcactccagcctggcgacaagagtgagactccacctcaaaaaaaaaaaaaagaatccaatactgcccaaggataggtattttatagatgggcaactggctgaaaggttaattctctagggctagtagaactggatcccaacaccaaactcttaattagacctaggcctcagctgcactgcccgaaaagcatttgggcagaccctgagcagaatactggtctcaggccaagcccaatacagccattaaagatgacctacagtgctgtgtaccctggggcaatagggttaaatggtagttagcaactagggctagtcttcccttacctcaaaggctctcactaccgtggaccacctagtctgtaactctttctgaggagctgttactgaatattaaaaagatagacttcaaaaaaaaaaaaaaaaaa

SEQ ID NO: 143 - protein, 654 aa, Homo sapiens
MKLSLVAAMLLLLSAARAEEEDKKEDVGTVVGIDLGTTYSCVGVFKNGRVEIIANDQGNRITPSYVAFTPEGERLIGDAAKNQLTSNPENTVFDAKRLIGRTWNDPSVQQDIKFLPFKVVEKKTKPYIQVDIGGGQTKTFAPEEISAMVLTKMKETAEAYLGKKVTHAVVTVPAYFNDAQRQATKDAGTIAGLNVMRIINEPTAAAIAYGLDKREGEKNILVFDLGGGTFDVSLLTIDNGVFEVVATNGDTHLGGEDFDQRVMEHFIKLYKKKTGKDVRKDNRAVQKLRREVEKAKRALSSQHQARIEIESFYEGEDFSETLTRAKFEELNMDLFRSTMKPVQKVLEDSDLKKSDIDEIVLVGGSTRIPKIQQLVKEFFNGKEPSRGINPDEAVAYGAAVQAGVLSGDQDTGDLVLLDVCPLTLGIETVGGVMTKLIPRNTVVPTKKSQIFSTASDNQPTVTIKVYEGERPLTKDNHLLGTFDLTGIPPAPRGVPQIEVTFEIDVNGILRVTAEDKGTGNKNKITITNDQNRLTPEEIERMVNDAEKFAEEDKKLKERIDTRNELESYAYSLKNQIGDKEKLGGKLSSEDKETMEKAVEEKIEWLESHQDADIEDFKAKKKELEEIVQPIISKLYGSAGPPPTGEEDTAEKDEL

SEQ ID NO: 144 - DNA, 1633 bp, Homo sapiens
  CDS (287)..(1138)
cagaatctccggcagtttttgtacctcaagaagtaagtggaacacctttccctgtcatagttattttcatccagacatctggtggaagcatcagattccttacagatataagagaggcatcatttaaaaggtagaacaggatcgacaaacaaggatttatgtcaggatctctcagcctctgtgttaccgagggcatttctaacagtcttcttactacggcctccgccgaccgcgcgctcgccccgccgctcctgctgcagccccagggcccctcgccgccgccaccatggacgccatcaagaagaagatgcagatgctgaagctcgacaaggagaacgccttggatcgagctgagcaggcggaggccgacaagaaggcggcggaagacaggagcaagcagctggaagatgagctggtgtcactgcaaaagaaactcaagggcaccgaagatgaactggacaaatactctgaggctctcaaagatgcccaggagaagctggagctggcagagaaaaaggccaccgatgctgaagccgacgtagcttctctgaacagacgcatccagctggttgaggaagagttggatcgtgcccaggagcgtctggcaacagctttgcagaagctggaggaagctgagaaggcagcagatgagagtgagagaggcatgaaagtcattgagagtcgagcccaaaaagatgaagaaaaaatggaaattcaggagatccaactgaaagaggcaaagcacattgctgaagatgccgaccgcaaatatgaagaggtggcccgtaagctggtcatcattgagagcgacctggaacgtgcagaggagcgggctgagctctcagaaggccaagtccgacagctggaagaacaattaagaataatggatcagaccttgaaagcattaatggctgcagaggataagtactcgcagaaggaagacagatatgaggaagagatcaaggtcctttccgacaagctgaaggaggctgagactcgggctgagtttgcggagaggtcagtaactaaattggagaaaagcattgatgacttagaagagaaagtggctcatgccaaagaagaaaaccttagtatgcatcagatgctggatcagactttactggagttaaacaacatgtgaaaacctccttagctgcgaccacattctttcattttgttttgttttgttttgtttttaaacacctgcttaccccttaaatgcaatttatttacttttaccactgtcacagaaacatccacaagataccagctaggtcagggggtggggaaaacacatacaaaaagcaagcccatgtcagggcgatcctggttcaaatgtgccatttcccgggttgatgctgccacactttgtagagagtttagcaacacagtgtgcttagtcagcgtaggaatcctcactaaagcaggagaagttccattcaaagtgccaatgatagagtcaacaaggaaggttaatgttggaaacacaatcaggtgtggattggtgctactttgaacaaaaggtccccctgtggtcttttgttcaacattgtacaatgtagaactctgtccaacactaatttattttgtcttgagttttactacaagatgagactatggatcccgcatgcct

SEQ ID NO: 145 - protein, 284 aa, Homo sapiens
MDAIKKKMQMLKLDKENALDRAEQAEADKKAAEDRSKQLEDELVSLQKKLKGTEDELDKYSEALKDAQEKLELAEKKATDAEADVASLNRRIQLVEEELDRAQERLATALQKLEEAEKAADESERGMKVIESRAQKDEEKMEIQEIQLKEAKHIAEDADRKYEEVARKLVIIESDLERAEERAELSEGQVRQLEEQLRIMDQTLKALMAAEDKYSQKEDRYEEEIKVLSDKLKEAETRAEFAERSVTKLEKSIDDLEEKVAHAKEENLSMHQMLDQTLLELNNM

SEQ ID NO: 146 - DNA, 1991 bp, Homo sapiens; identical to SEQ ID NO: 1
  CDS (61)..(1839)

SEQ ID NO: 147 - protein, 593 aa, Homo sapiens; identical to SEQ ID NO: 2

SEQ ID NO: 148 - DNA, 1044 bp, Homo sapiens
  CDS (119)..(970)
tgctgctctcctcccgctccgtcctcctcgcctgccaccggtgcacccagtccgctcacccagcccagtccgtccggtcctcaccgcctgccggccggcccaccccccaccgcaggccatggacgccatcaagaagaagatgcagatgctgaagctggacaaggagaacgccatcgaccgcgccgagcaggccgaagccgacaagaagcaagctgaggaccgctgcaagcagctggaggaggagcagcaggccctccagaagaagctgaaggggacagaggatgaggtggaaaagtattctgaatccgtgaaggaggcccaggagaaactggagcaggccgagaagaaggccactgatgctgaggcagatgtggcctccctgaaccgccgcattcagctggttgaggaggagctggaccgggcccaggagcgcctggctacagccctgcagaagctggaggaggccgagaaggcggctgatgagagcgagagaggaatgaaggtcatcgaaaaccgggccatgaaggatgaggagaagatggaactgcaggagatgcagctgaaggaggccaagcacatcgctgaggattcagaccgcaaatatgaagaggtggccaggaagctggtgatcctggaaggagagctggagcgctcggaggagagggctgaggtggccgagagccgagccagacagctggaggaggaacttcgaaccatggaccaggccctcaagtccctgatggcctcagaggaggagtattccaccaaagaagataaatatgaagaggagatcaaactgttggaggagaagctgaaggaggctgagacccgagcagagtttgccgagaggtctgtggcaaagttggagaaaaccatcgatgacctagaagagaccttggccagtgccaaggaggagaacgtcgagattcaccagaccttggaccagaccctgctggaactcaacaacctgtgagggccagccccacccccagccaggctatggttgccaccccaacccaataaaactgatgttactagcctctc

SEQ ID NO: 149 - protein, 284 aa, Homo sapiens
MDAIKKKMQMLKLDKENAIDRAEQAEADKKQAEDRCKQLEEEQQALQKKLKGTEDEVEKYSESVKEAQEKLEQAEKKATDAEADVASLNRRIQLVEEELDRAQERLATALQKLEEAEKAADESERGMKVIENRAMKDEEKMELQEMQLKEAKHIAEDSDRKYEEVARKLVILEGELERSEERAEVAESRARQLEEELRTMDQALKSLMASEEEYSTKEDKYEEEIKLLEEKLKEAETRAEFAERSVAKLEKTIDDLEETLASAKEENVEIHQTLDQTLLELNNL

SEQ ID NO: 150 - DNA, 1149 bp, Homo sapiens
ttaccatttatttgcagaattaacagtataataaactgctctacaagattttctatcaaggagtatttagaagagagatataaactgtaagcttataaaagtggtttctagagaaagtaagcaataataaaccctctcatataagttaggcatgtatttaaatttataagatacatttcttttgcttgatacaaatctcatcttaaatatacggctaaggaacagaaaaaaattcaaactgagacactcctgtaactctgggaaaattacacttatcaaattttacatataaatttagaatgactaatgaatgtttcagaaatacattaattaccaagatgctctgaaaagtacattactgtacatacagcctgaagttaacctttctatgttaaatgaaaaaactttgtcattcatcaggtcacagaaaccaaaaactaaacaatgcaaaaaaaaaaaaaatctaaaaataaaagaattttatatttgaagttattctggatattcgcaccattttagcttctgaaaaaaatgcaactatgaaatgaagacctcatatattttcatttatcaatataatgttaaaagtttcattccacccggtgtggagtctggagacgacgtgcagaaatggcacctcgaaaggggaaggaaaagaaggaagaacaggtcatcagcctcggacctcaggtggctgaaggagagaatgtatttggtgtctgccatatctttgcatccttcaatgacacttttgtccatgtcactgatctttctggcaaggaaaccatctgccgtgtgactggtgggatgaaggtaaaggcagaccgagatgaatcctcaccatatgctgctatgttggctgcccaggatgtggcccagaggtgcaaggagctgggtatcaccgccctacacatcaaactccgggccacaggaggaaataggaccaagacccctggacctggggcccagtcggccctcagagcccttgcccgctcgggtatgaagatcgggcggattgaggatgtcacccccatcccctctgacagcactcgcaggaaggggggtcgccgtggtcgccgtctgtgaacaagattcctcaaaatattttctgttaataaattgccttcatgtaaaaaaaaaaaaaaaaaa

SEQ ID NO: 151 - DNA, 1144 bp, Homo sapiens
  CDS (216)..(881)
agaagcagtcagcccagggctctcggatgcagggagcctgggcccaaacagcagcttccggagtcggaaggagctgaggaagaagacagactgaaggagcttgcgacttttccgcctcggcaaccggacccagcagcaagcaggacgggcggcgctctgctactggtcccgttaagccagagtagcccaagccctgaagtcactgctcatccggaatggaaatcccgccgaccaactacccagcctccagggcggccttggtggcacagaactacatcaactaccagcaggggaccccgcacagggtgtttgaggtgcagaaggtcaaacaagccagcatggaggatattccaggaagaggacataagtatcgccttaaatttgctgttgaagaaattatacaaaaacaagttaaggtgaactgcacagctgaagtactttacccttcaacgggacaagaaactgcaccagaagtcaacttcacatttgaaggagaaactggaaagaatccagatgaagaagacaacacattttatcaaagacttaagtccatgaaggaaccgctagaagcacaaaatattccagacaattttggaaatgtatctccagaaatgacgctcgttctacatttagcctgggttgcctgtggttatataatatggcaaaattctactgaagacacatggtataaaatggtaaaaattcaaactgtcaagcaagtgcaaagaaatgatgactttattgaattagactacaccattctacttcataatatagcatctcaggagattattccctggcaaatgcaagttctctggcatccacaatacggcactaaagtaaaacataatagccgtctgccaaaggaagtacaactggaataaacaaaaaccctaacactggaagtgtaaacatgtctattgatgtgtatgccaatttcactggcatctagcttatgaggccaaataatcccaaagtgtcactttatataaatgtcttgattacagtatagaactttatagagtccataatacaaagtatcactacataaaaatgtctttaaaacagtaatagtggtatgtatatccaaaataaaaagcttcaatttcagccaaaaaaaaaaaaaaaaaaaaaaaaaaaaaaa

SEQ ID NO: 152 - protein, 222 aa, Homo sapiens
MEIPPTNYPASRAALVAQNYINYQQGTPHRVFEVQKVKQASMEDIPGRGHKYRLKFAVEEIIQKQVKVNCTAEVLYPSTGQETAPEVNFTFEGETGKNPDEEDNTFYQRLKSMKEPLEAQNIPDNFGNVSPEMTLVLHLAWVACGYIIWQNSTEDTWYKMVKIQTVKQVQRNDDFIELDYTILLHNIASQEIIPWQMQVLWHPQYGTKVKHNSRLPKEVQLE

SEQ ID NO: 153 - DNA, 916 bp, Homo sapiens
  CDS (36)..(824)
aagacggaggtcctctttccttgcctaacgcagccatggctcgtggtcccaagaagcatctgaagcgggtggcagctccaaagcattggatgctggataaattgaccggtgtgtttgctcctcgtccatccaccggtccccacaagttgagagagtgtctccccctcatcattttcctgaggaacagacttaagtatgccctgacaggagatgaagtaaagaagatttgcatgcagcggttcattaaaatcgatggcaaggtccgaactgatataacctaccctgctggattcatggatgtcatcagcattgacaagacgggagagaatttccgtctgatctatgacaccaagggtcgctttgctgtacatcgtattacacctgaggaggccaagtacaagttgtgcaaagtgagaaagatctttgtgggcacaaaaggaatccctcatctggtgactcatgatgcccgcaccatccgctaccccgatcccctcatcaaggtgaatgataccattcagattgatttggagactggcaagattactgatttcatcaagttcgacactggtaacctgtgtatggtgactggaggtgctaacctaggaagaattggtgtgatcaccaacagagagaggcaccctggatcttttgacgtggttcacgtgaaagatgccaatggcaacagctttgccactcgactttccaacatttttgttattggcaagggcaacaaaccatggatttctcttccccgaggaaagggtatccgcctcaccattgctgaagagagagacaaaagactggcggccaaacagagcagtgggtgaaatgggtccctgggtgacatgtcagatctttgtacgtaattaaaaatattgtggcaggattaatagcaaaaaaaaaaaaaaaaaaaaaa

SEQ ID NO: 154 - protein, 263 aa, Homo sapiens [sequence omitted]

SEQ ID NO: 155 - DNA, 586 bp, Homo sapiens
cttttcctaacactcacaacaaaactaactaatactaacatctcagacgctcaggaaatagaaaccgtctgaactatcctgcccgccatcatcctagtcctcatcgccctcccatccctacgcatcctttacataacagacgaggtcaacgatccctcccttaccatcaaatcaattggccaccaatggtactgaacctacgagtacaccgactacggcggactaatcttcaactcctacatacttcccccattattcctagaaccaggcgacctgcgactccttgacgttgacaatcgagtagtactcccgattgaagcccccattcgtataataattacatcacaagacgtcttgcactcatgagctgtccccacattaggcttaaaaacagatgcaattcccggacgtctaaaccaaaccactttcaccgctacacgaccgggggtatactacggtcaatgctctgaaatctgtggagcaaaccacagtttcatgcccatcgtcctagaattaattcccctaaaaatctttgaaatagggcccgtatttaccctatagcaccccctctaccccctctagagcc

SEQ ID NO: 156 - DNA, 5128 bp, Homo sapiens
  CDS (250)..(1611)
ccgagtgcctcgcagcccctcccgaggcgcagccgccagaccagtggagccggggcgcagggcgggggcggaggcgccggggcgggggatgcggggccgcggcgcagccccccggccctgagagcgaggacagcgccgcccggcccgcagccgtcgccgcttctccacctcggcccgtggagccggggcgtccgggcgtagccctcgctcgcctgggtcagggggtgcgcgtcgggggaggcagaagccatggatcccgggcagcagccgccgcctcaaccggccccccagggccaagggcagccgccttcgcagcccccgcaggggcagggcccgccgtccggacccgggcaaccggcacccgcggcgacccaggcggcgccgcaggcaccccccgccgggcatcagatcgtgcacgtccgcggggactcggagaccgacctggaggcgctcttcaacgccgtcatgaaccccaagacggccaacgtgccccagaccgtgcccatgaggctccggaagctgcccgactccttcttcaagccgccggagcccaaatcccactcccgacaggccagtactgatgcaggcactgcaggagccctgactccacagcatgttcgagctcattcctctccagcttctctgcagttgggagctgtttctcctgggacactgacccccactggagtagtctctggcccagcagctacacccacagctcagcatcttcgacagtcttcttttgagatacctgatgatgtacctctgccagcaggttgggagatggcaaagacatcttctggtcagagatacttcttaaatcacatcgatcagacaacaacatggcaggaccccaggaaggccatgctgtcccagatgaacgtcacagcccccaccagtccaccagtgcagcagaatatgatgaactcggcttcagccatgaaccagagaatcagtcagagtgctccagtgaaacagccaccacccctggctccccagagcccacagggaggcgtcatgggtggcagcaactccaaccagcagcaacagatgcgactgcagcaactgcagatggagaaggagaggctgcggctgaaacagcaagaactgcttcggcaggtgaggccacaggagttagccctgcgtagccagttaccaacactggagcaggatggtgggactcaaaatccagtgtcttctcccgggatgtctcaggaattgagaacaatgacgaccaatagctcagatcctttccttaacagtggcacctatcactctcgagatgagagtacagacagtggactaagcatgagcagctacagtgtccctcgaaccccagatgacttcctgaacagtgtggatgagatggatacaggtgatactatcaaccaaagcaccctgccctcacagcagaaccgtttcccagactaccttgaagccattcctgggacaaatgtggaccttggaacactggaaggagatggaatgaacatagaaggagaggagctgatgccaagtctgcaggaagctttgagttctgacatccttaatgacatggagtctgttttggctgccaccaagctagataaagaaagctttcttacatggttatagagccctcaggcagactgaattctaaatctgtgaaggatctaaggagacacatgcaccggaaatttccataagccagttgcagttttcaggctaatacagaaaaagatgaacaaacgtccagcaagatactttaatcctctattttgctcttccttgtccattgctgctgttaatgtattgctgacctctttcacagttggctctaaagaatcaaaagaaaaaaactttttatttcttttgctattaaaactactgttcattttgggggctgggggaagtgagcctgtttggatgatggatgccattccttttgcccagttaaatgttcaccaatcattttaactaaatactcagacttagaagtcagatgcttcatgtcacagcatttagtttgttcaacagttgtttcttcagcttcctttgtccagtggaaaaacatgatttactggtctgacaagccaaaaatgttatatctgatattaaatacttaatgctgatttgaagagatagctgaaaccaaggctgaagactgttttactttcagtattttcttttcctcctagtgctatcattagtcacataatgaccttgattttattttaggagcttataaggcatgagacaatttccatataaatatattaattattgccacatactctaatatagattttggtggataattttgtgggtgtgcattttgttctgttttgttgggttttttgttttttttgtttttggcagggtcggtgggggggttggttggttggttggttttgtcggaacctaggcaaatgaccatattagtgaatctgttaatagttgtagcttgggatggttattgtagttgttttggtaaaatcttcatttcctggttttttttaccaccttatttaaatctcgattatctgctctctcttttatatacatacacacacccaaacataacatttataatagtgtggtagtggaatgtatccttttttaggtttccctgctttccagttaatttttaaaatggtagcgctttgtatgcatttagaatacatgactagtagtttatatttcactggtagtttaaatctggttggggcagtctgcagatgtttgaagtagtttagtgttctagaaagagctattactgtggatagtgcctaggggagtgctccacgccctctgggcatacggtagatattatctgatgaattggaaaggagcaaaccagaaatggctttattttctcccttggactaatttttaagtctcgattggaattcagtgagtaggttcataatgtgcatgacagaaataagctttatagtggtttaccttcatttagctttggaagttttctttgccttagttttggaagtaaattctagtttgtagttctcatttgtaatgaacacattaacgactagattaaaatattgccttcaagattgttcttacttacaagacttgctcctacttctatgctgaaaattgaccctggatagaatactataaggttttgagttagctggaaaagtgatcagattaataaatgtatattggtagttgaatttagcaaagaaatagagataatcatgattatacctttatttttacaggaagagatgatgtaactagagtatgtgtctacaggagtaataatggtttccaaagagtattttttaaaggaacaaaacgagcatgaattaactcttcaatataagctatgaagtaatagttggttgtgaattaaagtggcaccagctagcacctctgtgttttaagggtctttcaatgtttctagaataagcccttattttcaagggttcataacaggcataaaatctcttctcctggcaaaagctgctatgaaaagcctcagcttgggaagatagatttttttccccccaattacaaaatctaagtattttggcccttcaatttggaggagggcaaaagttggaagtaagaagttttattttaagtactttcagtgctcaaaaaaatgcaatcactgtgttgtatataatagttcataggttgatcactcataataattgactctaaggcttttattaagaaaacagcagaaagattaaatcttgaattaagtctggggggaaatggccactgcagatggagttttagagtagtaatgaaattctacctagaatgcaaaattgggtatatgaattacatagcatgttgttgggattttttttaatgtgcagaagatcaaagctacttggaaggagtgcctataatttgccagtagccacagattaagattatatcttatatatcagcagattagctttagcttagggggagggtgggaaagtttggggggggggttgtgaagatttagggggaccttgatagagaactttataaacttctttctctttaataaagacttgtcttacaccgtgctgccattaaaggcagctgttctagagtttcagtcacctaagtacacccacaaaacaatatgaatatggagatcttcctttacccctcaactttaatttgcccagttatacctcagtgttgtagcagtactgtgatacctggcacagtgctttgatcttacgatgccctctgtactgacctgaaggagacctaagagtcctttccctttttgagtttgaatcatagccttgatgtggtctcttgttttatgtccttgttcctaatgtaaaagtgcttaactgcttcttggttgtattgggtagcattgggataagattttaactgggtattcttgaattgcttttacaataaaccaattttataatctttaaatttatcaactttttacatttgtgttattttcagtcagggcttcttagatctacttatggttgatggagcacattgatttggagtttcagatcttccaaagcactatttgttgtaataacttttctaaatgtagtgcctttaaaggaaaaatgaacacagggaagtgactttgctacaaataatgttgctgtgttaagtattcatattaaatacatgccttctatatggaacatggcagaaagactgaaaaataacagtaattaattgtgtaattcagaattcataccaatcagtgttgaaactcaaacattgcaaaagtgggtggcaatattcagtgcttaacacttttctagcgttggtacatctgagaaatgagtgctcaggtggattttatcctcgcaagcatgttgttataagaattgtgggtgtgcctatcataacaattgttttctgtatcttgaaaaagtattctccacattttaaatgttttatattagagaattctttaatgcacacttgtcaaatatatatatatagtaccaatgttacctttttattttttgttttagatgtaagagcatgctcatatgttaggtacttacataaattgttacattattttttcttatgtaatacctttttgtttgtttatgtggttcaaatatattctttccttaaaaaaaaaaaaaaaaaaaaaaaaaaaaaaaaaaaaaaa

SEQ ID NO: 157 - protein, 454 aa, Homo sapiens
MDPGQQPPPQPAPQGQGQPPSQPPQGQGPPSGPGQPAPAATQAAPQAPPAGHQIVHVRGDSETDLEALFNAVMNPKTANVPQTVPMRLRKLPDSFFKPPEPKSHSRQASTDAGTAGALTPQHVRAHSSPASLQLGAVSPGTLTPTGVVSGPAATPTAQHLRQSSFEIPDDVPLPAGWEMAKTSSGQRYFLNHIDQTTTWQDPRKAMLSQMNVTAPTSPPVQQNMMNSASAMNQRISQSAPVKQPPPLAPQSPQGGVMGGSNSNQQQQMRLQQLQMEKERLRLKQQELLRQVRPQELALRSQLPTLEQDGGTQNPVSSPGMSQELRTMTTNSSDPFLNSGTYHSRDESTDSGLSMSSYSVPRTPDDFLNSVDEMDTGDTINQSTLPSQQNRFPDYLEAIPGTNVDLGTLEGDGMNIEGEELMPSLQEALSSDILNDMESVLAATKLDKESFLTWL

SEQ ID NO: 158 - DNA, 2999 bp, Homo sapiens
  CDS (72)..(2612)
atacttgtgcggttccaagtgtggagaaagcggctctgggtctagattgagggatactccccctttccaccatgggcaagaagggcaaagttggcaagagccgacgagacaagttttatcacttggcgaaggagacgggttaccgttcccgatctgctttcaagctgatccagctcaatcgccgctttcagttcctgcagaaagcccgagccttgctggacctgtgtgctgcgccagggggatggctgcaggtagctgccaagtttatgcctgtatccagccttattgtgggagtggacctggttccaatcaagcctctccccaatgtggtgactctccaggaggacatcacaacagaacgttgtaggcaggccctgaggaaggagctgaagacctggaaggttgatgttgtgctcaatgatggggcccccaacgttggggctagctgggtccatgatgcttactcacaagcccatttgacactgatggctctacgtttggcttgtgactttttggcccgtggtggcagcttcatcacaaaggttttccgttctcgtgactatcagcctctgctatggatctttcagcagctgttccgccgtgtccaggccaccaagccccaagcctctcgccatgaatctgcagagatctttgtagtctgccaaggattcctggcccctgacaaggttgacagtaaattctttgaccccaaatttgcctttaaggaggttgaagttcaggctaagaccgttactgaattggttactaagaagaagccaaaggctgaaggctatgctgagggtgacctcactctctatcaccgtacctcagtcactgacttcctccgagctgccaaccctgttgacttcctctccaaggccagcgaaatcatggtagatgatgaagagttggcacagcatccagctaccactgaggacatacgggtgtgctgtcaggacatcagagtgttggggcgcaaggagctcaggtcgctactaaactggagaacaaaacttcggcgatatgtggccaagaagctgaaagaacaagcaaaggcactggacatcagcctcagctctggagaggaagatgaaggtgatgaggaggactcaacagctggaaccacaaagcagccctctaaggaggaggaggaagaggaggaggaggaacaactgaaccagaccttggcagaaatgaaggcccaggaggtggcggaattgaagaggaagaaaaagaagctgttgcgtgagcagagaaagcagcgggagcgtgtggagctgaagatggatctgcctggggtttccattgcagacgagggggagactggcatgttctccttgtgcaccatccggggtcaccagttattagaggaagtaacacaaggggatatgagtgcagcagacacatttctgtccgatctgccaagggatgatatctatgtgtcagatgttgaggacgacggtgatgacacatctctggatagtgacctggatccagaggagctggcaggagtcaggggacatcagggtctaagggaccaaaagcgtatgcgacttactgaagtgcaagatgataaagaggaggaggaggaggagaatccactgctggtaccactggaggaaaaggcagtactgcaggaagaacaagccaacctgtggttctcaaagggcagctttgctgggatcgaggacgatgccgatgaggccctggagatcagtcaggcccagctgttatttgagaaccggcggaagggacggcagcagcagcagaagcagcagctgccacagacacccccttcctgtttgaagactgagataatgtctcccctgtaccaagatgaagcccctaagggaacagaggcttcttcggggacagaagctgccactggccttgaaggggaagaaaaggatggcatctcagacagtgatagcagtactagcagtgaggaagaagagagctgggaacccctccgtggtaagaagcgaagccgtgggcctaagtcagatgatgacgggtttgagatagtgcctattgaggacccagcgaaacatcggatactggaccccgaaggccttgctctaggtgctgttattgcctcttccaaaaaggccaagagagacctcatagataactccttcaaccggtacacatttaatgaggatgagggggagcttccggagtggtttgtgcaagaggaaaagcagcaccggatacgacagttgcctgttggtaagaaggaggtggagcattaccggaaacgctggcgggaaatcaatgcacgtcccatcaagaaggtggctgaggctaaggctagaaagaaaaggaggatgctgaagaggctggagcagaccaggaagaaggcagaagccgtggtgaacacagtggacatctcagaacgagagaaagtggcacagctgcgaagtctctacaagaaggctgggcttggcaaggagaaacgccatgtcacctacgttgtagccaaaaaaggtgtgggccgcaaagtgcgccggccagctggagtcagaggtcatttcaaggtggtggactcaaggatgaagaaggaccaaagagcacagcaacgtaaggaacaaaagaaaaaacacaaacggaagtaagcagagctgccaggctcccaggagagcatggggactaggaggaagggtgtggcatggctcagtctggcccccttgattaccggcctagcccctgctcacatcacagctgtctgaagaacagtgaggtggagtgcctagaactcccgtggtggtcctgagcagagaggaggatgtcctcctgcctgcctgaaggtctcccatgaaaacactgctgaactgtgttgacactcatgaccctttttttaaaccgttaaagggaagttcggtgttggagcgatactcaatgtagtcagtctacacctggacgtgtgggccacttaagccctccccacccccatcctattcctaaataaaaccaggataatggaaaaaaaaaaaaaaaaa

SEQ ID NO: 159 - protein, 847 aa, Homo sapiens
MGKKGKVGKSRRDKFYHLAKETGYRSRSAFKLIQLNRRFQFLQKARALLDLCAAPGGWLQVAAKFMPVSSLIVGVDLVPIKPLPNVVTLQEDITTERCRQALRKELKTWKVDVVLNDGAPNVGASWVHDAYSQAHLTLMALRLACDFLARGGSFITKVFRSRDYQPLLWIFQQLFRRVQATKPQASRHESAEIFVVCQGFLAPDKVDSKFFDPKFAFKEVEVQAKTVTELVTKKKPKAEGYAEGDLTLYHRTSVTDFLRAANPVDFLSKASEIMVDDEELAQHPATTEDIRVCCQDIRVLGRKELRSLLNWRTKLRRYVAKKLKEQAKALDISLSSGEEDEGDEEDSTAGTTKQPSKEEEEEEEEEQLNQTLAEMKAQEVAELKRKKKKLLREQRKQRERVELKMDLPGVSIADEGETGMFSLCTIRGHQLLEEVTQGDMSAADTFLSDLPRDDIYVSDVEDDGDDTSLDSDLDPEELAGVRGHQGLRDQKRMRLTEVQDDKEEEEEENPLLVPLEEKAVLQEEQANLWFSKGSFAGIEDDADEALEISQAQLLFENRRKGRQQQQKQQLPQTPPSCLKTEIMSPLYQDEAPKGTEASSGTEAATGLEGEEKDGISDSDSSTSSEEEESWEPLRGKKRSRGPKSDDDGFEIVPIEDPAKHRILDPEGLALGAVIASSKKAKRDLIDNSFNRYTFNEDEGELPEWFVQEEKQHRIRQLPVGKKEVEHYRKRWREINARPIKKVAEAKARKKRRMLKRLEQTRKKAEAVVNTVDISEREKVAQLRSLYKKAGLGKEKRHVTYVVAKKGVGRKVRRPAGVRGHFKVVDSRMKKDQRAQQRKEQKKKHKRK

SEQ ID NO: 160 - DNA, 1217 bp, Homo sapiens
  CDS (177)..(833)
caactcatggcggcggcggcggcggcggcagctgcttgggcgcggtgcggtggtgactgagctacgagcctggcggcgggtgtgcgccgagccccggcccggcccggccctcgcgtgcctcccaggctccgcacccctgatgctgcgcgggtgctgagcccgcttcggccgggacgatggtgaagtatttcctgggccagagcgtgctccggagttcctgggaccaagtgttcgccgccttctggcagcggtacccgaatccctatagcaaacatgtcttgacggaagacatagtacaccgggaggtgacccctgaccagaaactgctgtcccggcgactcctgaccaagaccaacaggatgccacgctgggccgagcgactatttcctgccaatgttgctcactcggtgtacgtcctggaggactctattgtggacccacagaatcagaccatgactaccttcacctggaacatcaaccacgcccggctgatggtggtggaggaacgatgtgtttactgtgtgaactctgacaacagtggctggactgaaatccgccgggaagcctgggtctcctctagcttatttggtgtctccagagctgtccaggaatttggtcttgcccggttcaaaagcaacgtgaccaagactatgaagggttttgaatatatcttggctaagctgcaaggcgaggccccttccaaaacacttgttgagacagccaaggaagccaaggagaaggcaaaggagacggcactggcagctacagagaaggccaaggacctcgccagcaaggcggccaccaagaagcagcagcagcagcaacagtttgtgtagccagtctaccaccaccacagcaccccagacagctaggcttagcccctctgccctcccttcattgtactttatcattaaaaatcaacttccagccctgtctgctgtctacgtggtgggttgtggggatgcagtttggcatctgcagtacaccaagcacatgattcatgtctgagccaggtctgcttattctcccattgggcagctgaggaccgaggcacagaggtgcggtgacttgcccggggctccaggtagcctgcaggttaactggcggtaagtgctagactgtaagcccgacaagggcagggcttttggttttgttctctgatgtgtctcagtatctagcacataatagacactcaataaatacttgttgaattcaaa

SEQ ID NO: 161 - protein, 219 aa, Homo sapiens
MVKYFLGQSVLRSSWDQVFAAFWQRYPNPYSKHVLTEDIVHREVTPDQKLLSRRLLTKTNRMPRWAERLFPANVAHSVYVLEDSIVDPQNQTMTTFTWNINHARLMVVEERCVYCVNSDNSGWTEIRREAWVSSSLFGVSRAVQEFGLARFKSNVTKTMKGFEYILAKLQGEAPSKTLVETAKEAKEKAKETALAATEKAKDLASKAATKKQQQQQQFV

SEQ ID NO: 162 - DNA, 1033 bp, Homo sapiens
  CDS (63)..(953)
cctagcgccgctgggcctgcaggtctctgtcgagcagcggacgccggtctctgttccgcaggatggggtttgttaaagttgttaagaataaggcctactttaagagataccaagtgaaatttagaagacgacgagagggtaaaactgattattatgctcggaaacgcttggtgatacaagataaaaataaatacaacacacccaaatacaggatgatagttcgtgtgacaaacagagatatcatttgtcagattgcttatgcccgtatagagggggatatgatagtctgcgcagcgtatgcacacgaactgccaaaatatggtgtgaaggttggcctgacaaattatgctgcagcatattgtactggcctgctgctggcccgcaggcttctcaataggtttggcatggacaagatctatgaaggccaagtggaggtgactggtgatgaatacaatgtggaaagcattgatggtcagccaggtgccttcacctgctatttggatgcaggccttgccagaactaccactggcaataaagtttttggtgccctgaagggagctgtggatggaggcttgtctatccctcacagtaccaaacgattccctggttatgattctgaaagcaaggaatttaatgcagaagtacatcggaagcacatcatgggccagaatgttgcagattacatgcgctacttaatggaagaagatgaagatgcttacaagaaacagttctctcaatacataaagaacagcgtaactccagacatgatggaggagatgtataagaaagctcatgctgctatacgagagaatccagtctatgaaaagaagcccaagaaagaagttaaaaagaagaggtggaaccgtcccaaaatgtcccttgctcagaagaaggatcgggtagctcaaaagaaggcaagcttcctcagagctcaggagcgggctgctgagagctaaacccagcaattttctatgattttttcagatatagataataaacttatgaacagcaactaaaaaaaaaaaaaaaaaaa

SEQ ID NO: 163 - protein, 297 aa, Homo sapiens [sequence omitted]

SEQ ID NO: 164 - DNA, 1217 bp, Homo sapiens; identical to SEQ ID NO: 160
  CDS (177)..(833)

SEQ ID NO: 165 - protein, 219 aa, Homo sapiens; identical to SEQ ID NO: 161

SEQ ID NO: 166 - DNA, 1567 bp, Homo sapiens
  CDS (951)..(1022)
cccaaacccactccaccttactaccagacaaccttagccaaaccatttacccaaataaagtataggcgatagaaattgaaacctggcgcaatagatatagtaccgcaagggaaagatgaaaaattataaccaagcataatatagcaaggactaacccctataccttctgcataatgaattaactagaaataactttgcaaggagagccaaagctaagacccccgaaaccagacgagctacctaagaacagctaaaagagcacacccgtctatgtagcaaaatagtgggaagatttataggtagaggcgacaaacctaccgagcctggtgatagctggttgtccaagatagaatcttagttcaactttaaatttgcccacagaaccctctaaatccccttgtaaatttaactgttagtccaaagaggaacagctctttggacactaggaaaaaaccttgtagagagagtaaaaaatttaacacccatagtaggcctaaaagcagccaccaattaagaaagcgttcaagctcaacacccactacctaaaaaatcccaaacatataactgaactcctcacacccaattggaccaatctatcaccctatagaagaactaatgttagtataagtaacatgaaaacattctcctccgcataagcctgcgtcagattaaaacactgaactgacaattaacagcccaatatctacaattaaccaacaagtcattattaccctcactgtcaacccaacacaggcatgctcataaggaaaggttaaaaaaagtaaaaggaactcggcaaatcttaccccgcctgtttaccaaaaacatcacctctagcatcaccagtattagaggcaccgcctgcccagtgacacatgtttaacggccgcggtaccctaaccgtgcaaaggtagcataatcacttgttccttaattagggacctgtatgaatggctccacgagggttcagctgtctcttacttttaaccagtgaaattgacctgcccgtgaagaggcgggcataacacagcaagacgagaagaccctatggagctttaatttattaatgcaaacagtacctaacaaacccacaggtcctaaactaccaaacctgcattaaaaatttcggttggggcgacctcggagcagaacccaacctccgagcagtacatgctaagacttcaccagtcaaagcgaactactatactcaattgatccaataacttgaccaacggaacaagttaccctagggataacagcgcaatcctattctagagtccatatcaacaatagggtttacgacctcgatgttggatcaggacatcccaatggtgcagccgctattaaaggttcgtttgttcaacgattaaagtcctacgtgatctgagttcagaccggagtaatccaggtcggtttctatctacttcaaattcctccctgtacgaaaggacaagagaaataaggcctacttcacaaagcgccttcccccgtaaatgatatcatctcaacttagtattatacccacacccacccaagaacagggtttgttaagaaaaaaaaaaaaaaa

SEQ ID NO: 167 - protein, 24 aa, Homo sapiens
MAPRGFSCLLLLTSEIDLPVKRRA

SEQ ID NO: 168 - DNA, 3333 bp, Homo sapiens
  CDS (315)..(2027)
acgcgtccgagctggctcagggcgtccgctaggctcggacgacctgctgagcctcccaaaccgcttccataaggctttgcctttccaacttcagctacagtgttagctaagtttggaaagaaggaaaaaagaaaatccctgggccccttttcttttgttctttgccaaagtcgtcgttgtagtctttttgcccaaggctgttgtgtttttagaggtgctatctccagttccttgcactcctgttaacaagcacctcagcgagagcagcagcagcgatagcagccgcagaagagccagcggggtcgcctagtgtcatgaccagggcgggagatcacaaccgccagagaggatgctgtggatccttggccgactacctgacctctgcaaaattccttctctaccttggtcattctctctctacttggggagatcggatgtggcactttgcggtgtctgtgtttctggtagagctctatggaaacagcctccttttgacagcagtctacgggctggtggtggcagggtctgttctggtcctgggagccatcatcggtgactgggtggacaagaatgctagacttaaagtggcccagacctcgctggtggtacagaatgtttcagtcatcctgtgtggaatcatcctgatgatggttttcttacataaacatgagcttctgaccatgtaccatggatgggttctcacttcctgctatatcctgatcatcactattgcaaatattgcaaatttggccagtactgctactgcaatcacaatccaaagggattggattgttgttgttgcaggagaagacagaagcaaactagcaaatatgaatgccacaatacgaaggattgaccagttaaccaacatcttagcccccatggctgttggccagattatgacatttggctccccagtcatcggctgtggctttatttcgggatggaacttggtatccatgtgcgtggagtacgtcctgctctggaaggtttaccagaaaaccccagctctagctgtgaaagctggtcttaaagaagaggaaactgaattgaaacagctgaatttacacaaagatactgagccaaaacccctggagggaactcatctaatgggtgtgaaagactctaacatccatgagcttgaacatgagcaagagcctacttgtgcctcccagatggctgagcccttccgtaccttccgagatggatgggtctcctactacaaccagcctgtgtttctggctggcatgggtcttgctttcctttatatgactgtcctgggctttgactgcatcaccacagggtacgcctacactcagggactgagtggttccatcctcagtattttgatgggagcatcagctataactggaataatgggaactgtagcttttacttggctacgtcgaaaatgtggtttggttcggacaggtctgatctcaggattggcacagctttcctgtttgatcttgtgtgtgatctctgtattcatgcctggaagccccctggacttgtccgtttctccttttgaagatatccgatcaaggttcattcaaggagagtcaattacacctaccaagatacctgaaattacaactgaaatatacatgtctaatgggtctaattctgctaatattgtcccggagacaagtcctgaatctgtgcccataatctctgtcagtctgctgtttgcaggcgtcattgctgctagaatcggtctttggtcctttgatttaactgtgacacagttgctgcaagaaaatgtaattgaatctgaaagaggcattataaatggtgtacagaactccatgaactatcttcttgatcttctgcatttcatcatggtcatcctggctccaaatcctgaagcttttggcttgctcgtattgatttcagtctcctttgtggcaatgggccacattatgtatttccgatttgcccaaaatactctgggaaacaagctctttgcttgcggtcctgatgcaaaagaagttaggaaggaaaatcaagcaaatacatctgttgtttgagacagtttaactgttgctatcctgttactagattatatagagcacatgtgcttattttgtactgcagaattccaataaatggctgggtgttttgctctgtttttaccacagctgtgccttgagaactaaaagctgtttaggaaacctaagtcagcagaaattaactgattaatttcccttatgttgaggcatggaaaaaaaattggaaaagaaaaactcagtttaaatacggagactataatgataacactgaattcccctatttctcatgagtagatacaatcttacgtaaaagagtggttagtcacgtgaattcagttatcatttgacagattcttatctgtactagaattcagatatgtcagttttctgcaaaactcactcttgttcaagactagctaatttatttttttgcatcttagttatttttaaaaacaaattcttcaagtatgaagactaaattttgataactaatattatccttattgatcctattgatcttaaggtatttacatgtatgtggaaaaacaaaacacttaactagaattctctaataaggtttatggtttagcttaaagagcacctttgtatttttattatcagatggggcaacatattgtatgaagcatatgtagcacttcacagcatggttatcatgtaagctgcaggtagaagcaaagctgtaaagtagatttatcacacaatgactgcatacagacttcaaatatgtcaatagtttggtcatagaacctagaagccaaaagccacacagaagggcaagaatcccaatttaactcatgttatcatcattagtgatctgtgttgtagaacatgagggtgtaagccttcagcctggcaagttacatgtagaaagcccacacttgtgaaggttttgttttacaaatcacttgatttaacacactcaggtagaatatttttatttttactgttttatacccagaagttatttctacattgttctacagcaagaatattcataaaagtatccctttcaaatgcctttgagaagaatagaagaaaaaaagtttgtatatattttaaaaaattgttttaaaagtcagtttgcaacatgtctgtaccaagatggtactttgccttaaccgtttatatgcactttcatggagactgcaatacgttgctatgagcactttctttatccttggagtttaatcctttgcttcatctttctacagtatgacataatgatttgctatgttgtaaaatctttgtaaaaaatttctatataaaaatattttgaaaatcttaaaaaaaaaaaaaaaaa

SEQ ID NO: 169 - protein, 571 aa, Homo sapiens
MTRAGDHNRQRGCCGSLADYLTSAKFLLYLGHSLSTWGDRMWHFAVSVFLVELYGNSLLLTAVYGLVVAGSVLVLGAIIGDWVDKNARLKVAQTSLVVQNVSVILCGIILMMVFLHKHELLTMYHGWVLTSCYILIITIANIANLASTATAITIQRDWIVVVAGEDRSKLANMNATIRRIDQLTNILAPMAVGQIMTFGSPVIGCGFISGWNLVSMCVEYVLLWKVYQKTPALAVKAGLKEEETELKQLNLHKDTEPKPLEGTHLMGVKDSNIHELEHEQEPTCASQMAEPFRTFRDGWVSYYNQPVFLAGMGLAFLYMTVLGFDCITTGYAYTQGLSGSILSILMGASAITGIMGTVAFTWLRRKCGLVRTGLISGLAQLSCLILCVISVFMPGSPLDLSVSPFEDIRSRFIQGESITPTKIPEITTEIYMSNGSNSANIVPETSPESVPIISVSLLFAGVIAARIGLWSFDLTVTQLLQENVIESERGIINGVQNSMNYLLDLLHFIMVILAPNPEAFGLLVLISVSFVAMGHIMYFRFAQNTLGNKLFACGPDAKEVRKENQANTSVV

SEQ ID NO: 170 - DNA, 1527 bp, Homo sapiens
  CDS (30)..(1172)
agcggggagtcaccggaagcagcttgcaaatggcgtctccctcgctggagcggccagaaaaaggcgctggaaaaagtgaatttcgtaaccagaagccgaagccggagaaccaagatgaatcagaactccttacggttcctgatggttggaaggagccagctttttccaaagaggacaatcccagaggacttttggaggagagcagtttcgcaactttgttcccaaaatacagggaagcttacttgaaagagtgttggccattggtgcagaaagccttaaatgaacatcatgttaatgcaaccctggacctgatcgaaggcagcatgactgtttgtactacaaagaagacttttgatccatatatcatcattagggccagagatctgataaaactgttagcaaggagtgtttcatttgaacaggcagtacgaattcttcaggatgatgttgcatgtgacatcattaaaataggttctttagtaaggaataaagagagatttgtaaaacgaagacaacggcttattggtcccaaaggatctacattgaaggcattggaactcttaactaattgttacattatggttcagggaaacacagtttcagccattggaccttttagtggcttaaaagaggttagaaaagtagcccttgatactatgaagaatattcatccaatttataacattaaaagcttaatgattaagagagagttggcaaaagattctgaattacgatcacaaagttgggagagatttttgccacagttcaaacacaaaaatgtgaataaacgcaaggaaccaaagaaaaaaactgttaagaaagaatatacgccattcccaccaccacaaccagaaagtcagatcgataaagaattggctagtggtgaatactttttgaaggcaaatcagaagaagcggcagaaaatggaagcaataaaggctaaacaagcagaagccatcagtaagagacaagaggaaagaaacaaagcatttattccacctaaggaaaaaccaattgtgaaacctaaggaagcttctactgaaactaaaattgatgtggccagcatcaaggaaaaggttaagaaagcaaagaataagaaactgggagctcttacagctgaagaaattgcacttaagatggaggcagatgaaaagaaaaagaagaaaaaaaagtaacatacccaaaactccttgactagaactatctccttttgtaaaggattttgagatatcaggcattagttgccttatttgtgagaaattttctgagggctttttttttttttggtggtggtggttgttcatagaagagtgttctttataaattatattattattgtattttttgaaaaatttatactagaaagtggtatatatatctttgtatacattacgaccattgtgattatccattaaatccagtgtctgatgctattggttagtaatgatgtcccagcatttgatgttccctctctaatgataacaagtaaatatttaggtttatcccttttgaaaaaaaaaaaaaaaa

SEQ ID NO: 171 - protein, 381 aa, Homo sapiens
MASPSLERPEKGAGKSEFRNQKPKPENQDESELLTVPDGWKEPAFSKEDNPRGLLEESSFATLFPKYREAYLKECWPLVQKALNEHHVNATLDLIEGSMTVCTTKKTFDPYIIIRARDLIKLLARSVSFEQAVRILQDDVACDIIKIGSLVRNKERFVKRRQRLIGPKGSTLKALELLTNCYIMVQGNTVSAIGPFSGLKEVRKVALDTMKNIHPIYNIKSLMIKRELAKDSELRSQSWERFLPQFKHKNVNKRKEPKKKTVKKEYTPFPPPQPESQIDKELASGEYFLKANQKKRQKMEAIKAKQAEAISKRQEERNKAFIPPKEKPIVKPKEASTETKIDVASIKEKVKKAKNKKLGALTAEEIALKMEADEKKKKKKK

SEQ ID NO: 172 - DNA, 337 bp, Homo sapiens
aagcccgaatgatatttcctattcgcctacacaattctccgatccgtccctaacaaactaggaggcgtccttgccctattactatccatcctcatcctagcaataatccccatcctccatatatccaaacaacaaagcataatatttcgcccactaagccaatcactttattgactcctagccgcagacctcctcattctaacctgaatcggaggacaaccagtaagctacccttttaccatcattggacaagtagcatccgtactatacttcacaacaatcctaatcctaataccaactatctccctaattgaaaacaaaatactcaaatgggcct

SEQ ID NO: 173 - DNA, 2084 bp, Homo sapiens
  CDS (156)..(1295)
aaccgcatctgcagcgagcaactgagaagccaagactgagccggcggccgcggcgcagcgaacgagcagtgaccgtgctcctacccagctctgcttcacagcgcccacctgtctccgcccctcggcccctcgcccggctttgcctaaccgccacgatgatgttctcgggcttcaacgcagactacgaggcgtcatcctcccgctgcagcagcgcgtccccggccggggatagcctctcttactaccactcacccgcagactccttctccagcatgggctcgcctgtcaacgcgcaggacttctgcacggacctggccgtctccagtgccaacttcattcccacggtcactgccatctcgaccagtccggacctgcagtggctggtgcagcccgccctcgtctcctctgtggccccatcgcagaccagagcccctcaccctttcggagtccccgccccctccgctggggcttactccagggctggcgttgtgaagaccatgacaggaggccgagcgcagagcattggcaggaggggcaaggtggaacagttatctccagaagaagaagagaaaaggagaatccgaagggaaaggaataagatggctgcagccaaatgccgcaaccggaggagggagctgactgatacactccaagcggagacagaccaactagaagatgagaagtctgctttgcagaccgagattgccaacctgctgaaggagaaggaaaaactagagttcatcctggcagctcaccgacctgcctgcaagatccctgatgacctgggcttcccagaagagatgtctgtggcttcccttgatctgactgggggcctgccagaggttgccaccccggagtctgaggaggccttcaccctgcctctcctcaatgaccctgagcccaagccctcagtggaacctgtcaagagcatcagcagcatggagctgaagaccgagccctttgatgacttcctgttcccagcatcatccaggcccagtggctctgagacagcccgctccgtgccagacatggacctatctgggtccttctatgcagcagactgggagcctctgcacagtggctccctggggatggggcccatggccacagagctggagcccctgtgcactccggtggtcacctgtactcccagctgcactgcttacacgtcttccttcgtcttcacctaccccgaggctgactccttccccagctgtgcagctgcccaccgcaagggcagcagcagcaatgagccttcctctgactcgctcagctcacccacgctgctggccctgtgagggggcagggaaggggaggcagccggcacccacaagtgccactgcccgagctggtgcattacagagaggagaaacacatcttccctagagggttcctgtagacctagggaggaccttatctgtgcgtgaaacacaccaggctgtgggcctcaaggacttgaaagcatccatgtgtggactcaagtccttacctcttccggagatgtagcaaaacgcatggagtgtgtattgttcccagtgacacttcagagagctggtagttagtagcatgttgagccaggcctgggtctgtgtctcttttctctttctccttagtcttctcatagcattaactaatctattgggttcattattggaattaacctggtgctggatattttcaaattgtatctagtgcagctgattttaacaataactactgtgttcctggcaatagtgtgttctgattagaaatgaccaatattatactaagaaaagatacgactttattttctggtagatagaaataaatagctatatccatgtactgtagtttttcttcaacatcaatgttcattgtaatgttactgatcatgcattgttgaggtggtctgaatgttctgacattaacagttttccatgaaaacgttttattgtgtttttaatttatttattaagatggattctcagatatttatatttttattttatttttttctaccttgaggtcttttgacatgtggaaagtgaatttgaatgaaaaatttaagcattgtttgcttattgttccaagacattgtcaataaa

SEQ ID NO: 174 - protein, 380 aa, Homo sapiens
MMFSGFNADYEASSSRCSSASPAGDSLSYYHSPADSFSSMGSPVNAQDFCTDLAVSSANFIPTVTAISTSPDLQWLVQPALVSSVAPSQTRAPHPFGVPAPSAGAYSRAGVVKTMTGGRAQSIGRRGKVEQLSPEEEEKRRIRRERNKMAAAKCRNRRRELTDTLQAETDQLEDEKSALQTEIANLLKEKEKLEFILAAHRPACKIPDDLGFPEEMSVASLDLTGGLPEVATPESEEAFTLPLLNDPEPKPSVEPVKSISSMELKTEPFDDFLFPASSRPSGSETARSVPDMDLSGSFYAADWEPLHSGSLGMGPMATELEPLCTPVVTCTPSCTAYTSSFVFTYPEADSFPSCAAAHRKGSSSNEPSSDSLSSPTLLAL

SEQ ID NO: 175 - DNA, 3203 bp, Homo sapiens
  CDS (480)..(1457)
gagaggcagagatcggggcgagacaatggggatgtgggcgcgggagccccgttccggcttagcagcacctcccagccccgcagaataaaaccgatcgcgccccctccgcgcgcgccctcccccgagtgcggagcgggaggaggcggcggcggccgaggaggaggaggaggaggccccggaggaggaggcgttggaggtcgaggcggaggcggaggaggaggaggccgaggcgccggaggaggccgaggcgccggagcaggaggaggccggccggaggcggcatgagacgagcgtggcggccgcggctgctcggggccgcgctggttgcccattgacagcggcgtctgcagctcgcttcaagatggccgcttggctcgcattcattttctgctgaacgacttttaactttcattgtcttttccgcccgcttcgatcgcctcgcgccggctgctctttccgggattttttatcaagcagaaatgcatcgaacaacgagaatcaagatcactgagctaaatccccacctgatgtgtgtgctttgtggagggtacttcattgatgccacaaccataatagaatgtctacattccttctgtaaaacttgtattgttcgttacctggagaccagcaagtattgtcctatttgtgatgtccaagttcacaagaccagaccactactgaatataaggtcagataaaactctccaagatattgtatacaaattagttccagggcttttcaaaaatgaaatgaagagaagaagggatttttatgcagctcatccttctgctgatgctgccaatggctctaatgaagatagaggagaggttgcagatgaagataagagaattataactgatgatgagataataagcttatccattgaattctttgaccagaacagattggatcggaaagtaaacaaagacaaagagaaatctaaggaggaggtgaatgataaaagatacttacgatgcccagcagcaatgactgtgatgcacttaagaaagtttctcagaagtaaaatggacatacctaatactttccagattgatgtcatgtatgaggaggaacctttaaaggattattatacactaatggatattgcctacatttatacctggagaaggaatggtccacttccattgaaatacagagttcgacctacttgtaaaagaatgaagatcagtcaccagagagatggactgacaaatgctggagaactggaaagtgactctgggagtgacaaggccaacagcccagcaggaggagttccctccacctcttcttgtttgcctagccccagtactccagtgcagtctcctcatccacagtttcctcacatttccagtactatgaatggaaccagcaacagccccagcggtaaccaccaatcttcttttgccaatagacctcgaaaatcatcagtaaatgggtcatcagcaacttcttctggttgatacctgagactgttaaggaaaaaaattttaaacccctgatttatatagatatcttcagccattacgactttctagagctaatacatgtgactatcgtccaatttgctttcttttgtagtgacattaaatttggctataaaagatggactacatgtgatactcctgtccgtcttggttcaaaagaaagattgttgttataaagaattggtttcttggaaagcaggcaagactttttctctgtgttaggaaagatgggaaatggtttctgtaaccattgtttggatttggaagtactctgcagtggacataagcattgggccatagtttgttaatctcaactaacgcctacattacattctccttgatcgttcttgttattacgctgttttgtgaacctgtagaaaaacaagtgctttttatcttgaaattcaaccaacggaaagaatatgcatagaataatgcattctatgatgccatgtcactgtgaataacgatttcttgcagctatttagccattttgattgctgtttgatttatacttctctgttgctacgcaaaaccgatcaaagaaaagtgaacttcagttttacaatctgtatgcctaaaagcgggtactaccgtttattttactgacttgtttaaatgattcgcttttgtaagaatcagatggcattatgcttgttgtacaatgccatattggtatatgacataacaggaaacagtattgtatgatatatctataaatgctataaagaaatattgtgtttcatgcattcagaaatgattgttaaaattctcccaactggttcgacctttgcagatacccataacctatgttgagccttgcttaccagcaaagaatatttttaatgtggatatctaattctaaagtctgttccattagaagcaattggcacatctttctatactttatatacttttctccagtaatacatgtttactttaaaaattgttgcagtgaagaaaaacctttaactgagaaatatggaaaccgtcttaattttccattggctatgatggaattaatattgtattttaaaaatgcatattgatcactataattctaaaacaattttttaaataaaccagcaggttgctaaaagaaggcattttatctaaagttattttaataggtggtatagcagtaattttaaatttaagagttgcttttacagttaacaatggaatatgccttctctgctatgtctgaaaatagaagctatttattatgagcttctacaggtatttttaaatagagcaagcatgttgaatttaaaatatgaataaccccacccaacaattttcagtttattttttgctttggtcgaacttggtgtgtgttcatcagttatttgtgagggtgtttattctatatgaatattgtttcatgtttgtagggaaattgtagctaaacatttcattgtccccagtctgcaaaagaagcacaattctattgctttgtcttgcttatagtcattaaatcattacttttacatatattgctgttacttctgctttctttaaaaatatagtaaaggatgttttatgaagtcacaagatacatatatttttattttgacctaaatttgtacagtcccattgtaagtgttgtttctaattatagatgtaaaatgaaatttcatttgtaattggaaaaaatccaataaaaaggatattcatttagaaaatagctaagatctttaataaaaatttgatatgaaa

SEQ ID NO: 176 - protein, 326 aa, Homo sapiens [sequence omitted]

SEQ ID NO: 177 - DNA, 1679 bp, Homo sapiens
  CDS (89)..(1144)
gtttgttggctgcggcagcaggtagcaaagtgacgccgagggcctgagtgctccagtagccaccgcatctggagaaccagcggttaccatggaggggatcagtatatacacttcagataactacaccgaggaaatgggctcaggggactatgactccatgaaggaaccctgtttccgtgaagaaaatgctaatttcaataaaatcttcctgcccaccatctactccatcatcttcttaactggcattgtgggcaatggattggtcatcctggtcatgggttaccagaagaaactgagaagcatgacggacaagtacaggctgcacctgtcagtggccgacctcctctttgtcatcacgcttcccttctgggcagttgatgccgtggcaaactggtactttgggaacttcctatgcaaggcagtccatgtcatctacacagtcaacctctacagcagtgtcctcatcctggccttcatcagtctggaccgctacctggccatcgtccacgccaccaacagtcagaggccaaggaagctgttggctgaaaaggtggtctatgttggcgtctggatccctgccctcctgctgactattcccgacttcatctttgccaacgtcagtgaggcagatgacagatatatctgtgaccgcttctaccccaatgacttgtgggtggttgtgttccagtttcagcacatcatggttggccttatcctgcctggtattgtcatcctgtcctgctattgcattatcatctccaagctgtcacactccaagggccaccagaagcgcaaggccctcaagaccacagtcatcctcatcctggctttcttcgcctgttggctgccttactacattgggatcagcatcgactccttcatcctcctggaaatcatcaagcaagggtgtgagtttgagaacactgtgcacaagtggatttccatcaccgaggccctagctttcttccactgttgtctgaaccccatcctctatgctttccttggagccaaatttaaaacctctgcccagcacgcactcacctctgtgagcagagggtccagcctcaagatcctctccaaaggaaagcgaggtggacattcatctgtttccactgagtctgagtcttcaagttttcactccagctaacacagatgtaaaagacttttttttatacgataaataacttttttttaagttacacatttttcagatataaaagactgaccaatattgtacagtttttattgcttgttggatttttgtcttgtgtttctttagtttttgtgaagtttaattgacttatttatataaattttttttgtttcatattgatgtgtgtctaggcaggacctgtggccaagttcttagttgctgtatgtctcgtggtaggactgtagaaaagggaactgaacattccagagcgtgtagtgaatcacgtaaagctagaaatgatccccagctgtttatgcatagataatctctccattcccgtggaacgtttttcctgttcttaagacgtgattttgctgtagaagatggcacttataaccaaagcccaaagtggtatagaaatgctggtttttcagttttcaggagtgggttgatttcagcacctacagtgtacagtcttgtattaagttgttaataaaagtacatgttaaacttacttagtgttatg

SEQ ID NO: 178 - protein, 352 aa, Homo sapiens
MEGISIYTSDNYTEEMGSGDYDSMKEPCFREENANFNKIFLPTIYSIIFLTGIVGNGLVILVMGYQKKLRSMTDKYRLHLSVADLLFVITLPFWAVDAVANWYFGNFLCKAVHVIYTVNLYSSVLILAFISLDRYLAIVHATNSQRPRKLLAEKVVYVGVWIPALLLTIPDFIFANVSEADDRYICDRFYPNDLWVVVFQFQHIMVGLILPGIVILSCYCIIISKLSHSKGHQKRKALKTTVILILAFFACWLPYYIGISIDSFILLEIIKQGCEFENTVHKWISITEALAFFHCCLNPILYAFLGAKFKTSAQHALTSVSRGSSLKILSKGKRGGHSSVSTESESSSFHSS

SEQ ID NO: 179 - DNA, 1519 bp, Homo sapiens
  CDS (33)..(1385)
cagcccctgctttccctagttccagttccaagatggggaaatccttcgccaacttcatgtgcaagaaagactttcatcctgcctccaaatccaatatcaaaaaagtatggatggcagaacagaaaatatcatatgataagaagaaacaagaagaattgatgcagcaatatcttaaagaacaagaatcatatgataatagattgcttatgggagatgaacgtgtaaagaatggccttaatttcatgtatgaagccccaccaggagctaaaaaagaaaacaaagagaaagaagaaacagaaggagagaccgaatacaaatttgaatggcagaaaggagccccacgagaaaaatatgccaaagatgacatgaacatcagagatcagccctttggtattcaggttcgaaatgtgaggtgcattaaatgtcacaaatgggtcatgtcaacacagatcgagaatgtcctttgtttggtctttctggaagtcaatgcaagttcggttcccactgatggctcagggccatcgatgcacccctcggagctaataggcgagatgagaaaccagtgggtttgcactgaaacgaaatgtactggggagaaacttgaccgcaaactgatccatcacaggagtatgttgcaagtgcagggtgaagaagatccagaagttgaatttttaaagtcactaacaaccaaacaaaaacagaaacttctcaggaaattagatcgactggagaagaaaaaaaagaaaaaagatagaaaaaagaaaaagtttcagaagagcagaagtaaacacaaaaaacataagtcctcttcttcctatcttcctcctcctcctcctcttcctctactgagacttcagaaagcagtagtgagagtgagagtaacaataaagaaaaaaaaactacaaaggaagaaaagaaagaaaaacaagtgttcagggcataacaacagtgattctgaagagaaggacaagtctaagaagagaaagcttcatgaagaactttctagcactcaccataaccgggaaaaagccaaggaaaagcccaggttcttaaaacacgagagttctagggaggacagcaaatggagccattctgattctgacaaaaagtccagaacccataaacatagcccagagaagagaggctctgaaagaaaggaggggagcagcagaagccacggcagggaggaaaggagccggagaagccagccagaagtcctggtagttacaagcaaagggagacaaggaaacgggcacagcgaacatcctggtgaagagcaaagcagaagaaatgacagcagaagccatggcacagacttgtatagaggagaaaaaatgtacagagagcacccaggaggtacacatactaaagtgacacaaagagaatgaagcagaagtagagaagaaagactgtatgtgacaattacctgggaataaaaatatctccacttttttattgaatacctttagcaaggggtaaattatatactgttgtctttctaataaaaaagctcaatttt

SEQ ID NO: 180 - protein, 451 aa, Homo sapiens
MGKSFANFMCKKDFHPASKSNIKKVWMAEQKISYDKKKQEELMQQYLKEQESYDNRLLMGDERVKNGLNFMYEAPPGAKKENKEKEETEGETEYKFEWQKGAPREKYAKDDMNIRDQPFGIQVRNVRCIKCHKWVMSTQIENVLCLVFLEVNASSVPTDGSGPSMHPSELIGEMRNQWVCTETKCTGEKLDRKLIHHRSMLQVQGEEDPEVEFLKSLTTKQKQKLLRKLDRLEKKKKKKDRKKKKFQKSRSKHKKHKSSSSYLPPPPPLPLLRLQKAVVRVRVTIKKKKLQRKKRKKNKCSGHNNSDSEEKDKSKKRKLHEELSSTHHNREKAKEKPRFLKHESSREDSKWSHSDSDKKSRTHKHSPEKRGSERKEGSSRSHGREERSRRSQPEVLVVTSKGRQGNGHSEHPGEEQSRRNDSRSHGTDLYRGEKMYREHPGGTHTKVTQRE

SEQ ID NO: 181 - DNA, 2840 bp, Homo sapiens
  CDS (487)..(1140)
cggcctctcatttctcctagcccttctgttcttccttggccaagctgcaggggatttgggggatgtgggacctccaattcccagccccggcttcagctctttcccaggtgttgactccagctccagcttcagctccagctccaggtcgggctccagctccagccgcagcttaggcagcggaggttctgtgtcccagttgttttccaatttcaccggctccgtggatgaccgtgggacctgccagtgctctgtttccctgccagacaccacctttcccgtggacagagtggaacgcttggaattcacagctcatgttctttctcagaagtttgagaaagaactttccaaagtgagggaatatgtccaattaattagtttgtatgaaaagaaactgttaaacctaactgtccgaattgacatcatgggagaaggatacatttcttacactgaactggacttcgagctgataaggtagaagtgaaggagatggaaaaactggtcatacagctgaaggagagttttggtggaagctcagaaattgttgaccagctggaggtggagataagaaatatgactctcttggtagagaagcttgagacactagacaaaaacaatgtccttgccattcgccgagaaatcgtggctctgaagaccaagctgaaagagtgtgaggcctctaaagatcaaaacacccctgtcgtccaccctcctcccactccagggagctgtggtcatggtggtgtggtgaacatcagcaaaccgtctgtggttcagctcaactggagagggttttcttatctatatggtgcttggggtagggattactctccccagcatccaaacaaaggactgtattgggtggcgccattgaatacagatgggagactgttggagtattatatactgtacaacacactggatgatttgctattgtatataaatgctcgagagttgcggatcacctatggccaaggtagtggtacagcagtttacaacaacaacatgtacgtcaacatgtacaacaccgggaatattgccagagttaacctgaccaccaacacgattgctgtgactcaaactctccctaatgctgcctataataaccgcttttcatatgctaatgttgcttggcaagcatattgactttgctgtggatgagaatggattgtgggttatttattcaactgaagccagcactggttaacatggtgattagtaaactcaatgacaccacacttcaggtgctaaacacttggtataccaagcagtataaaccatctgcttctaacgccttcatggtatgtggggttctgtatgccacccgtactatgaacaccagaacagaagagattttttactattatgacacaaacacagggaaagagggcaaactagacattgtaatgcataagatgcaggaaaaagtgcagagcattaactataacccttttgaccagaaactttatgtctataacgatggttaccttctgaattatgatctttctgtcttgcagaagccccagtaagctgtttaggagttagggtgaaagagaaaatgtttgttgaaaaaatagtcttctccacttacttagatatctgcagatatctaagtaagtggagaagactattttttcaacaaacattttctctttcaccctaactcctaaacagcttactggggcttctgcaagacagaaagatcataattcagaaggtaaccatcgttatagacataaagtttctggtcaaaagggttatagttaatgctctgcactttttcctgcatcttatgcattacaatgtctagtttgccctctttccctgtgtttgtgtcataatagtaaaaaatctcttctgtttggcgtatagggattctttgtacaggaaatattgcccaatgactagtcctcatccatgtagcaccactaattcttccatgcctggaagaaacctggggacttagttaggtagattaatatctggagctcctcgagggaccaaatctccaacttttttttcccctcactagcacctggaatgatgctttgtatgtggcagataagtaaatttggcatgcttatatattctacatctgtaaagtgctgagttttatggagagaggcctttttatgcattaaattgtacatggcaaataaatcccagaaggatctgtagatgaggcacctgctttttcttttctctcattgtccaccttactaaaagtcagtagaatcttctacctcataacttccttccaaaggcagctcagaagattagaaccagacttactaaccaattccaccccccaccaacccccttctactgcctactttaaaaaaattaatagttttctatggaactgatctaagattagaaaaattaattttctttaatttcattatgaacttttatttacatgactctaagactataagaaaatctgatggcagtgacaaagtgctagcatttattgttatctaataaagaccttggagcatatgtgcaacttatgagtgtatcagttgttgcatgtaatttttgcctttgtttaagcctggaacttgtaagaaaatgaaaatttaatttttttttctaggacgagctatagaaaagctattgagagtatctagttaatcagtgcagtagttggaaaccttgctggtgtatgtgatgtgcttctgtgcttttgaatgactttatcatctagtctttgtctatttttcctttgatgttcaagtcctagtctataggattggcagtttaaatgctttactcccccttttaaaataaatgattaaaatgtgcttcgaaaaaaaaaaaaaaaaaaaaaaaaaaaaaaa

SEQ ID NO: 182 - protein, 218 aa, Homo sapiens
MEKLVIQLKESFGGSSEIVDQLEVEIRNMTLLVEKLETLDKNNVLAIRREIVALKTKLKECEASKDQNTPVVHPPPTPGSCGHGGVVNISKPSVVQLNWRGFSYLYGAWGRDYSPQHPNKGLYWVAPLNTDGRLLEYYILYNTLDDLLLYINARELRITYGQGSGTAVYNNNMYVNMYNTGNIARVNLTTNTIAVTQTLPNAAYNNRFSYANVAWQAY

SEQ ID NO: 183 - DNA, 3132 bp, Homo sapiens
  CDS (271)..(1899)
ccgcagaacttggggagccgccgccgccatccgccgccgcagccagcttccgccgccgcaggaccggcccctgccccagcctccgcagccgcggcgcgtccacgcccgcccgcgcccagggcgagtcggggtcgccgcctgcacgcttctcagtgttccccgcgccccgcatgtaacccggccaggcccccgcaacggtgtcccctgcagctccagccccgggctgcacccccccgccccgacaccagctctccagcctgctcgtccaggatggccgcggccaaggccgagatgcagctgatgtccccgctgcagatctctgacccgttcggatcctttcctcactcgcccaccatggacaactaccctaagctggaggagatgatgctgctgagcaacggggctccccagttcctcggcgccgccggggccccagagggcagcggcagcaacagcagcagcagcagcagcgggggcggtggaggcggcgggggcggcagcaacagcagcagcagcagcagcaccttcaaccctcaggcggacacgggcgagcagccctacgagcacctgaccgcagagtcttttcctgacatctctctgaacaacgagaaggtgctggtggagaccagttaccccagccaaaccactcgactgccccccatcacctatactggccgcttttccctggagcctgcacccaacagtggcaacaccttgtggcccgagcccctcttcagcttggtcagtggcctagtgagcatgaccaacccaccggcctcctcgtcctcagcaccatctccagcggcctcctccgcctccgcctcccagagcccacccctgagctgcgcagtgccatccaacgacagcagtcccatttactcagcggcacccaccttccccacgccgaacactgacattttccctgagccacaaagccaggccttcccgggctcggcagggacagcgctccagtacccgcctcctgcctaccctgccgccaagggtggcttccaggttcccatgatccccgactacctgtttccacagcagcagggggatctgggcctgggcaccccagaccagaagcccttccagggcctggagagccgcacccagcagccttcgctaacccctctgtctactattaaggcctttgccactcagtcgggctcccaggacctgaaggccctcaataccagctaccagtcccagctcatcaaacccagccgcatgcgcaagtatcccaaccggcccagcaagacgcccccccacgaacgcccttacgcttgcccagtggagtcctgtgatcgccgcttctcccgctccgacgagctcacccgccacatccgcatccacacaggccagaagcccttccagtgccgcatctgcatgcgcaacttcagccgcagcgaccacctcaccacccacatccgcacccacacaggcgaaaagcccttcgcctgcgacatctgtggaagaaagtttgccaggagcgatgaacgcaagaggcataccaagatccacttgcggcagaaggacaagaaagcagacaaaagtgttgtggcctcttcggccacctcctctctctcttcctacccgtccccggttgctacctcttacccgtccccggttactacctcttatccatccccggccaccacctcatacccatcccctgtgcccacctccttctcctctcccggctcctcgacctacccatcccctgtgcacagtggcttcccctccccgtcggtggccaccacgtactcctctgttccccctgctttcccggcccaggtcagcagcttcccttcctcagctgtcaccaactccttcagcgcctccacagggctttcggacatgacagcaaccttttctcccaggacaattgaaatttgctaaagggaaaggggaaagaaagggaaaagggagaaaaagaaacacaagagacttaaaggacaggaggaggagatggccataggagaggagggttcctcttaggtcagatggaggttctcagagccaagtcctccctctctactggagtggaaggtctattggccaacaatcctttctgcccacttccccttccccaattactattccctttgacttcagctgcctgaaacagccatgtccaagttcttcacctctatccaaagaacttgatttgcatggattttggataaatcatttcagtatcatctccatcatatgcctgaccccttgctcccttcaatgctagaaaatcgagttggcaaaatggggtttgggcccctcagagccctgccctgcacccttgtacagtgtctgtgccatggatttcgtttttcttggggtactcttgatgtgaagataatttgcatattctattgtattatttggagttaggtcctcacttgggggaaaaaaaaaaaaaaaagccaagcaaaccaatggtgatcctctattttgtgatgatgctgtgacaataagtttgaacctttttttttgaaacagcagtcccagtattctcagagcatgtgtcagagtgttgttccgttaacctttttgtaaatactgcttgaccgtactctcacatgtggcaaaatatggtttggtttttcttttttttttttgaaagtgttttttcttcgtccttttggtttaaaaagtttcacgtcttggtgccttttgtgtgatgccccttgctgatggcttgacatgtgcaattgtgagggacatgctcacctctagccttaaggggggcagggagtgatgatttgggggaggctttgggagcaaaataaggaagagggctgagctgagcttcggttctccagaatgtaagaaaacaaaatctaaaacaaaatctgaactctcaaaagtctatttttttaactgaaaatgtaaatttataaatatattcaggagttggaatgttgtagttacctactgagtaggcggcgatttttgtatgttatgaacatgcagttcattattttgtggttctattttactttgtacttgtgtttgcttaaacaaagtgactgtttggcttataaacacattgaatgcgctttattgcccatgggatatgtggtgtatatccttccaaaaaattaaaacgaaaataaagtagctgcgattggg

SEQ ID NO: 184 - protein, 543 aa, Homo sapiens
MAAAKAEMQLMSPLQISDPFGSFPHSPTMDNYPKLEEMMLLSNGAPQFLGAAGAPEGSGSNSSSSSSGGGGGGGGGSNSSSSSSTFNPQADTGEQPYEHLTAESFPDISLNNEKVLVETSYPSQTTRLPPITYTGRFSLEPAPNSGNTLWPEPLFSLVSGLVSMTNPPASSSSAPSPAASSASASQSPPLSCAVPSNDSSPIYSAAPTFPTPNTDIFPEPQSQAFPGSAGTALQYPPPAYPAAKGGFQVPMIPDYLFPQQQGDLGLGTPDQKPFQGLESRTQQPSLTPLSTIKAFATQSGSQDLKALNTSYQSQLIKPSRMRKYPNRPSKTPPHERPYACPVESCDRRFSRSDELTRHIRIHTGQKPFQCRICMRNFSRSDHLTTHIRTHTGEKPFACDICGRKFARSDERKRHTKIHLRQKDKKADKSVVASSATSSLSSYPSPVATSYPSPVTTSYPSPATTSYPSPVPTSFSSPGSSTYPSPVHSGFPSPSVATTYSSVPPAFPAQVSSFPSSAVTNSFSASTGLSDMTATFSPRTIEIC

SEQ ID NO: 185 - DNA, 3503 bp, Homo sapiens
  CDS (361)..(2415)
gggcggcgtggctgtcgggaaagaagggctggggcctgccgttcttcctcccgagtatcccctccagctggacgaccccacgctgcagcacgggcttccggcttctctcctcagtggccaattcgagggcacagcgggctccggaggcgcggcggcaagcctatcccgcctcccaaccacagcctccagcacccgagagaacggccgcccacagcacacgttctccggacaggagggcgaaggcccaagacctggagagatggtcagctctcaaaaaaggcacaaacaattgaaggatggataccatggcatatgttaaaagcgtgttgaaaggaaaataagaaagccaggaatctcaggatgaatcagtctagatcgagatcagatggtggcagtgaagaaaccttacctcaagaccataatcatcatgaaaatgagagaagatggcagcaagagcgtctccacagagaagaggcctattatcagtttattaatgaactcaatgatgaagattatcggcttatgagagaccataatcttttaggcacccctggagaaataacatcagaagaactgcaacagcggttagatggcgtcaaggaacaactagcatctcagcctgacttgagagatggaacgaattacagagactcagaagtccctagagaaagttcacatgaagattctcttctagaatggttgaacacctttcggcgcacaggaaatgcaactcgaagtggacaaaatgggaaccaaacttggagagctgtgagtcgaacaaacccgaacaatggagagtttcggtttagtttggaaatccacgtaaatcatgaaaatagaggatttgaaattcatggagaagattatacagacattccactttcagatagtaacagagatcatactgcaaataggcaacaaaggtcaactagtcctgtggctaggcgaacaagaagccaaacctcagtgaatttcaatggtagtagttccaacattccaaggactaggcttgcttcaagggggcaaaatccagctgaaggatctttctcaacattgggaaggttaagaaatggaattgggggagcagctggcattcctcgagctaacgcttcacgcactaatttcagtagtcacacaaaccaatcaggtggtagtgaactcaggcaaagggaggggcaacggtttggagcagcacatgtttgggaaaatggggctagaagtaatgttacagtgaggaatacaaaccaaagattagagccaataagattacgatctacttccaatagtcgaagccgttcaccaattcagagacagagtggcactgtttatcataattcccaaagggaaagtagaccagtacagcaaaccactagaagatctgttaggaggagaggtagaactcgagtctttttagagcaagatagagaacgagaacgcagaggtactgcatataccccattctctaattcaaggcttgtgtcaagaataacagtagaagaaggagaagaatccagcagatcctcaactgctgtacgacgacatccaacaatcacactggaccttcaagtgagaaggatccgtcctggagaaaatagagatcgggatagtattgcaaatagaactcgatccagagtagggctagcagaaaatacagtcactattgaaagcaatagtgggggctttcgccgaaccatttctcgtttagagcggtcaggtattcgaacctatgttagtaccataacagttcctcttcgtaggatttctgagaatgagcttgttgagccatcatcagtggctcttcggtcaattttaaggcagatcatgactgggtttggagaactgagttctctaatggaggccgattctgagtcagaacttcaaagaaatggccagcatttaccagacatgcactcagaactgagtaacttaggtacagataacaacaggagccagcacagggaaggttcctctcaagacaggcaggcccaaggagacagcactgaaatgcatggtgaaaacgagaccacccagcctcatactcgaaacagtgacagtaggggtggcaggcagttgcgaaatccaaacaatttagttgaaactggaacactacccattcttcgccttgctcacttttttttactaaatgaaagtgatgatgatgatcgaatacgtggtttaaccaaagagcagattgacaatctttccaccaggcactatgagcataacagtattgatagtgaactaggtaaaatctgtagtgtttgtattagtgactatgtaactggaaacaagctcaggcaattaccttgcatgcatgaatttcacattcattgtattgaccgatggctctcagagaattgcacttgtccgatctgtcggcagcctgttttagggtctaacatagcaaacaatgggtaaggtgatgggatctactcaaatactgttttttagtagaactgaatgttcaagcattgttttgctgagttatttgtgattagctaaccaggatgaaaaataacagattatatatagtttgaactatttttcgtgtgcttttttaaacttgttaaaaagaaatttatataaaatttaaaatacaaatgttaaattatccagaaatacagaatagttaatattgctagaaccaaataacctctaaaatgtttttattttggtaattttgtcatgctaagcacttttgtatctgcacaattcagtaggttaagaatcaatcttctttttcttaatagtacagcagactttagcttcaagtttcataggcttagtacttatatctagacatttgtgtctaaataagcttttcattaactttttattttaaggacagtatcttttcatgaaagagtatttggctgaatgtttgctatatatatgttacttgaaatgttaaatttaatatgcagcataccataggtgtatatataggtatataattttaaggttaaaatattcagtctacaagtttggttcttatttaagcttttgggctaatactgcatatggcacaatgtttaatattggcaagttcatctcagagaaaggggattcagatataattttaaagtagagataatttactgaagcgtctctgacaatctaacttattagacagcaagcaatatataatactgaaaaagtattcagaaatggaaaatttacatcatataggttatttaacttgtgttcagcctttttgtaacttttttgaaagtgcaaacaattctttggattattaaataaggtatacagtatgcatggtttctcaaatttagttttaaaatctaaaagtctataaagaatcagatgcataggcaatatgttaagttcacttggaggctaaaaatctccagtgaaaacaaaacgaaaacctttaagagaatgtagagtttatataaacacaaagtatgcattgaagatctgtttctaccaataaacattaaaacaaagactgtaaaaaaaaaaaaaaatgagcggccgcaagc

SEQ ID NO: 186 - protein, 685 aa, Homo sapiens [sequence omitted]

SEQ ID NO: 187 - DNA, 1633 bp, Homo sapiens
  CDS (12)..(1262)
aaagaagaaccatgaggctcatcctgcctgtgggtttgattgctaccactcttgcaattgctcctgtccgctttgacagggagaaggtgttccgcgtgaagccccaggatgaaaaacaagcagacatcataaaggacttggccaaaaccaatgagcttgacttctggtatccaggtgccacccaccacgtagctgctaatatgatggtggatttccgagttagtgagaaggaatcccaagccatccagtctgccttggatcaaaataaaatgcactatgaaatcttgattcatgatctacaagaagagattgagaaacagtttgatgttaaagaagatatcccaggcaggcacagctacgcaaaatacaataattgggaaaagattgtggcttggactgaaaagatgatggataagtatcctgaaatggtctctcgtattaaaattggatctactgttgaagataatccactatatgttctgaagattggggaaaagaatgaaagaagaaaggctatttttatggattgtggcattcacgcacgagaatgggtctccccagcattctgccagtggtttgtctatcaggcaaccaaaacttatgggagaaacaaaattatgaccaaactcttggaccgaatgaatttttacattcttcctgtgttcaatgttgatggatatatttggtcatggacaaagaaccgcatgtggagaaaaaatcgttccaagaaccaaaactccaaatgcatcggcactgacctcaacaggaattttaatgcttcatggaactccattcctaacaccaatgacccatgtgcagataactatcggggctctgcaccagagtccgagaaagagacgaaagctgtcactaatttcattagaagccacctgaatgaaatcaaggtttacatcaccttccattcctactcccagatgctattgtttccctatggatatacatcaaaactgccacctaaccatgaggacttggccaaagttgcaaagattggcactgatgttctatcaactcgatatgaaacccgctacatctatggcccaatagaatcaacaatttacccgatatcaggttcttctttagactgggcttatgacctgggcatcaaacacacatttgcctttgagctccgagataaaggcaaatttggttttctccttccagaatcccggataaagccaacgtgcagagagaccatgctagctgtcaaatttattgccaagtatatcctcaagcatacttcctaaagaactgccctctgtttggaataagccaattaatccttttttgtgcctttcatcagaaagtcaatcttcagttatccccaaatgcagcttctatttcacctgaatccttctcttgctcatttaagtcccatgttactgctgtttgcttttacttactttcagtagcaccataacgaagtagctttaagtgaaaccttttaactacctttctttgctccaagtgaagtttggacccagcagaaagcattattttgaaaggtgatatacagtggggcacagaaaacaaatgaaaaccctcagtttctcacagattttcaccatgtggcttcatcaatttatgtgctaatacaataaaataaaatgcactt

SEQ ID NO: 188 - protein, 417 aa, Homo sapiens
MRLILPVGLIATTLAIAPVRFDREKVFRVKPQDEKQADIIKDLAKTNELDFWYPGATHHVAANMMVDFRVSEKESQAIQSALDQNKMHYEILIHDLQEEIEKQFDVKEDIPGRHSYAKYNNWEKIVAWTEKMMDKYPEMVSRIKIGSTVEDNPLYVLKIGEKNERRKAIFMDCGIHAREWVSPAFCQWFVYQATKTYGRNKIMTKLLDRMNFYILPVFNVDGYIWSWTKNRMWRKNRSKNQNSKCIGTDLNRNFNASWNSIPNTNDPCADNYRGSAPESEKETKAVTNFIRSHLNEIKVYITFHSYSQMLLFPYGYTSKLPPNHEDLAKVAKIGTDVLSTRYETRYIYGPIESTIYPISGSSLDWAYDLGIKHTFAFELRDKGKFGFLLPESRIKPTCRETMLAVKFIAKYILKHTS

SEQ ID NO: 189 - DNA, 4608 bp, Homo sapiens
  CDS (12)..(755)
gacagaagtgaatgggaatggagaggccggcggcccgggagccgcatgggcccgacgcgctgcggcgcttccagggactgctgctggaccgccgaggccggctgcaccgccaggtgctgcgcctgcgcgaggtggcccggcgcctggagcgcctgcgcaggcgctccctcgtagccaacgtggccggcagctcgctgagcgcaacgggcgccctcgccgccatcgtggggctctcgctcagcccggtcaccctggggacctcgctgctggtgtcggccgtggggctgggggtggccacagccggaggggccgtcaccatcacgtccgatctctcgctgatcttctgcaactcccgggagctgcggagggtgcaggagatcgcggccacctgccaggaccagatgcgagagatcctgagctgcctcgagtttttctgccgctggcagggctgcggggaccgccagctgctgcagtgcgggaggaacgcctccatcgccctgtacaattctgtctacttcatcgtcttctttggctcacgtggcttcctcatccccaggcgggcggagggggacaccaaggttagccaggccgtgctgaaggccaagattcagaaactggccgagagcctggagtcctgcaccggggctctggacgaactcagcgagcagctggagtctcgggttcagctctgcaccaagtccagtcgtggccacgacctcaagatctctgctgaccagcgtgcagggctgtttttctgagaacatcctttccccctaatgaccgaggccagcaaatcatcctcatgggatgctccagaatttgtagctcccttaggaaaacaccaagctgggttaggagccgaaggcaaaggatgagaaaaactgtttttgaagtgggcaggtccccaaagcccttcttttcccatcactgtgacatctgcctgggcttgagtgctacggacttttcagtcttcctagtggaaaaatgtgacccaaaaactccttttcctttatcaaaaactttctgtctaaacacagctgggcaggcactcctgttttaaagttatttcggggtccctgaccctgccctggtggcttggcctgagactggagagagtgccatcctctgggtcctctccaagtcctactagtctttgaagtcctcaaaatgtgcgtgaggaaggcatttgcctctattccagaatttctgatacaaagaactccagaatccagagcaaatcagcccttctctgaacgttgtaggatggttcagaacccagagaggaccctggtgctgatatctcctcctcttccctttcccctcagcttacttactcccagatgcggcctgggtatgaagtaggcctttcctgagtggctcccaatccagtcctccaagtactcagaggggaagcccgtgaagccgtcatctaagtcctgctccctcacatgaagctgagggccagatagatggagcgactgccaacttcatttcccgacatcattgtgttcagaagagagtgatgggttttgagttagacagtcctgggcttgagacaggctttgtcactactgtgtgagtgtagccacctaatctctctgagactgtgtaaaacaaagatgataaaatctcaccctgttgtgagatattaaatgagccaaagtgcctagcatgatggtgctggctcatatagtgtagtccctggaatggcaaattaacatcacccaggaacttgttagaaaggcaaattcttggacacaaccctcctgatttatggaatcagaaactctggctgtggggcccagcaacctgagtttaaacaatttctctgggtggttctgcggcacactaaggtttgaaaatcactacaacaaatgctaacttctaatccccttgatgagctttcacgaagtctcacggcttctctagggactccatggtcttcagagtcgttcacagatgaccaaggacagactgtgtcccagaagccaaaatgagagagagagagagagcacgcgtacgtgcaccctggggcagtgtctcaccgtatgaataagggatgtaacactaaaagcccattagggggcagtgtttcccgcctgttgtagaaactggtacagaaaggatcctatatgaagttcctgaaactgacctttgtctattattaccttctctgaaaagtgccagtccatgtattttttatttattttaagtttgtaatttaatttttaattattgtttagtgtttgcatttaattttatttaatcaccacatttagaaaataataagagcaagtttctaaatgggagactgctgaggctctttgcaagagatgagattaagtttgagtttctaaggcagggcatgagctggaaatagcattgctttccttgattgtctctctccttcagggagattctttttctctagtgttttaagtgatcctttgaagtaagtgtggagagtcttgaatggcaagaccaggagctgagtttaagcttgtaatggaagcttgcattgtgggatatataactgaggaagcatatttatcctgaaggtattttgccagaaggtatcacttgacctggaaaaggaatctatttagttcaggaaagataaaaagtttagaggtatgtgaaggaagcacttagaacttgcaagcctgatgtcctatcaagttatgtcttctgggtgacagacaaaatagcttgtcttatggtggtgatgtgttgcattttcactttggggtctgtaagaaactgtcagtgaaaatatgtacaattccttcaatttccattcttaacaactgtaatgttgaaaaataagttgaaaagtctttgggaccatacatgcaaaaacggtgcctctgttacttaattatttaatattctataaatgtacccaatctgtccgcacccttcccagtgatggggcagtatgtctgaggaagtataatttcagtactggggtcggggagaggaggtgatgtttctacatttttattttttctataaattgcaattggtctgtatgctggtttattttgaaatttatattggtttcttttcaagctggtgtcatctcctagactgtttcacccagatgctagcattttttttttttttgagacagagtctcactctgtcacctaggctggagttgcagtggtttgatctcggctcactgcaacctccgactcctgggttcaagcaattcttctgcctcagcctcctgagtagctgggattacagatgtgcaccagcacacccggctaattttttgtatttttagtagagacagggtttcgccatgttggccaggctggtcttgaactcctggccttatgtgatccgcccaccttggcttcccaaagtgctgggattacaggcatgagccacctcgcctggccagatgctagcattttagatcaaacaattcattttagatgaattgttttgtttcacaatcattttaaatcattttagaatgtacttcacattattagttgtgttatggcataaaggtacaaccattccctaactccatcttttattaatgcttaagtttaaattatattcttccaatgcctaagctattccctagaattaaactgggcacttttggaagcagcaacagtaacagcagcagcaaacttttcctctcatattttgggtgtatcaaaagttctagacttttgaagttatgatttcagtggcccactttatttctaaggaagagtgtctactttggaacgatactttgcacatagtaggaactcaagaaatacatttgaataattataattaactgtttagctatcttaatgagaatttgttgacaacaaaagatcatccatcgccttatgtgtgagtaagattggagcctctatcaagatttagtcaagttcagttagattgattctagaaacaaatatttatttctttcttttacggggatgtgaataaggcttttccttaaggccttcattctttaaacaaacaggttgaaatggtatgttgtaaaagagaagacgggagagaggtatttagatgataagtgtacttcacaaaaatgccaaagtttgaaaaataggtatgtttgttctaaatgtttaagtgcttctctgttaggttctggggcttgcaatcatttgaattgttctgtttcacaataaaggagattcactgggttctgcattttcaggattcaatagaactgctccattaaaaaaataatccttagcaagcattcgaatcctaactgctttgatgcacttgccctcgggcacctgtcatttccaatatggtaggtgtcaaagtcaaaagtatttactgggagaaaaaagagaggagtggttgtagaagtctccctaaatcagacatgtcaagcaatcagccaacgtggtgtatttctcattcaatattttagtgtgaattgagacactgagataaagacatcgtgcagagataaatggggatacagttaaatgtagcaactcttgagttcattttttcccactgtagcaaaattaatgctttctctttattgaaataaattgctcattcctccaaaaaaaaaaaaaaaaaaaaaaaaaaaaaaaaaaaagg

SEQ ID NO: 190 - protein, 248 aa, Homo sapiens
MGMERPAAREPHGPDALRRFQGLLLDRRGRLHRQVLRLREVARRLERLRRRSLVANVAGSSLSATGALAAIVGLSLSPVTLGTSLLVSAVGLGVATAGGAVTITSDLSLIFCNSRELRRVQEIAATCQDQMREILSCLEFFCRWQGCGDRQLLQCGRNASIALYNSVYFIVFFGSRGFLIPRRAEGDTKVSQAVLKAKIQKLAESLESCTGALDELSEQLESRVQLCTKSSRGHDLKISADQRAGLFF

SEQ ID NO: 191 - DNA, 511 bp, Homo sapiens
  CDS (74)..(403)
ggcctcgtccttctcttaccgccatcttggctcctgtggaggcctgctgggaacgggacttctaaaaggaactatgtctggaaggctgtggtccaaggccatttttgctggctataagcggggtctccggaaccaaagggagcacacagctcttcttaaaattgaaggtgtttacgcccgagatgaaacagaattctatttgggcaagagatgcgcttatgtatataaagcaaagaacaacacagtcactcctggcggcaaaccaaacaaaaccagagtcatctggggaaaagtaactcgggcccatggaaacagtggcatggttcgtgccaaattccgaagcaatcttcctgctaaggccattggacacagaatccgagtgatgctgtacccctcaaggatttaaactaacgaaaaatcaataaataaatgtggatttgtgctcttgtatttttaagtggattaaaaaacttactaccttaaaaaaaaaaaaaaaaaaaaaaaaaaaaaa

SEQ ID NO: 192 - protein, 110 aa, Homo sapiens [sequence omitted]

SEQ ID NO: 193 - DNA, 3834 bp, Homo sapiens
  CDS (102)..(2297)
ctttcccgagtccgtttgaggaagtccccgaggcgcacagagcaagcccacgcgagggcacctctggaggggagcgcctgcaggaccttgtaaagtcaaaaatgtcagaaacttccaggaccgcctttggaggcagaagagcagttccacccaataactctaatgcagcggaagatgacctgcccacagtggagcttcagggcgtggtgccccggggcgtcaacctgcaagagtttcttaatgtcacgagcgttcacctgttcaaggagagatgggacactaacaaggtggaccaccacactgacaagtatgaaaacaacaagctgattgtccgcagagggcagtctttctatgtgcagattgacttcagtcgtccatatgaccccagaagggatctcttcagggtggaatacgtcattggtcgctacccacaggagaacaagggaacctacatcccagtgcctatagtctcagagttacaaagtggaaagtggggggccaagattgtcatgagagaggacaggtctgtgcggctgtccatccagtcttcccccaaatgtattgtggggaaattccgcatgtatgttgctgtctggactccctatggcgtacttcgaaccagtcgaaacccagaaacagacacgtacattctcttcaatccttggtgtgaagatgatgctgtgtatctggacaatgagaaagaaagagaagagtatgtcctgaatgacatcggggtaattttttatggagaggtcaatgacatcaagaccagaagctggagctatggtcagtttgaagatggcatcctggacacttgcctgtatgtgatggacagagcacaaatggacctctctggaagagggaatcccatcaaagtcagccgtgtggggtctgcaatggtgaatgccaaagatgacgaaggtgtcctcgttggatcctgggacaatatctatgcctatggcgtccccccatcggcctggactggaagcgttgacattctattggaataccggagctctgagaatccagtccggtatggccaatgctgggtttttgctggtgtctttaacacatttttacgatgccttggaataccagcaagaattgttaccaattatttctctgcccatgataatgatgccaatttgcaaatggacatcttcctggaagaagatgggaacgtgaattccaaactcaccaaggattcagtgtggaactaccactgctggaatgaagcatggatgacaaggcctgaccttcctgttggatttggaggctggcaagctgtggacagcaccccccaggaaaatagcgatggcatgtatcggtgtggccccgcctcggttcaagccatcaagcacggccatgtctgcttccaatttgatgcaccttttgtttttgcagaggtcaacagcgacctcatttacattacagctaagaaagatggcactcatgtggtggaaaatgtggatgccacccacattgggaaattaattgtgaccaaacaaattggaggagatggcatgatggatattactgatacttacaaattccaagaaggtcaagaagaagagagattggccctagaaactgccctgatgtacggagctaaaaagcccctcaacacagaaggtgtcatgaaatcaaggtccaacgttgacatggactttgaagtggaaaatgctgtgctgggaaaagacttcaagctctccatcaccttccggaacaacagccacaaccgttacaccatcacagcttatctctcagccaacatcaccttctacaccggggtcccgaaggcagaattcaagaaggagacgttcgacgtgacgctggagcccttgtccttcaagaaagaggcggtgctgatccaagccggcgagtacatgggtcagctgctggaacaagcgtccctgcacttctttgtcacagctcgcatcaatgagaccagggatgttctggccaagcaaaagtccaccgtgctaaccatccctgagatcatcatcaaggtccgtggcactcaggtagttggttctgacatgactgtgacagttgagtttaccaatcctttaaaagaaaccctgcgaaatgtctgggtacacctggatggtcctggagtaacaagaccaatgaagaagatgttccgtgaaatccggcccaactccaccgtgcagtgggaagaagtgtgccggccctgggtctctgggcatcggaagctgatagccagcatgagcagtgactccctgagacatgtgtatggcgagctggacgtgcagattcaaagacgaccttccatgtgaatgcacaggaagctgagatgaaccctggcatttggcctcttgtagtcttggctaaggaaattctaacgcaaaaatagctcttgctttgacttaggtgtgaagacccagacaggactgcagagggctccagagtggagatcccacatatttcaaaaacatgcttttccaaacccaggctattcggcaaggaagttagtttttaatctctccaccttccaaagagtgctaagcattagctttaattaagctctcatagctcataagagtaacagtcatcatttatcatcacaaatggctacatctccaaatatcagtgggctctcttaccagggagatttgctcaatacctggcctcatttaaaacaagacttcagattccccactcagccttttgggaataatagcacatgatttgggctctagaattccagtcccctttctcggggtcaggttctaccctccatgtgagaatatttttcccaggactagagcacaacataatttttatttttggcaaagccagaaaaagatctttcattttgcacctgcagccaagcaaatgcctgccaaattttagatttaccttgttagaagaggtggccccatattaacaaattgcatttgtgggaaacttaaccacctacaaggagataagaaagcaggtgcaacactcaagtctattgaataatgtagttttgtgatgcattttatagaatgtgtcacactgtggcctgatcagcaggagccaatatcccttactttaaccctttctgggatgcaatactaggaagtaaagtgaagaatttatctctttagttagtgattatatttcacccatctctcaggaatcatctcctttgcagaatgatgcaggttcaggtcccctttcagagatataataagcccaacaagttgaagaagctggcggatctagtgaccagatatatagaaggactgcagccactgattctctcttgtccttcacatcacccatgttgagacctcagcttggcactcaggtgctgaagggtaatatggactcagccttgcaaatagccagtgctagttctgacccaaccacagaggatgctgacatcatttgtattatgttccaaggctactacagagaaggctgcctgctatgtatttgcaaggctgatttatggtcagaatttccctctgatatgtctagggtgtgatttaggtcagtagactgtgattcttagcaaaaaatgaacagtgataagtatactgggggcaaaatcagaatggaatgctctggtctatataaccacatttctaagcctttgagactgttcctgagccttcagcactaacctatgagggtgagctggtcccctctatatatacatcatacttaactttactaagtaatctcacagcatttgccaagtctcccaatatccaattttaaaatgaaatgcattttgctagacagttaaactggcttaacttagtatattattattaattacaatgtaatagaagcttaaaataaagttaaactgattat

SEQ ID NO: 194 - protein, 732 aa, Homo sapiens
MSETSRTAFGGRRAVPPNNSNAAEDDLPTVELQGVVPRGVNLQEFLNVTSVHLFKERWDTNKVDHHTDKYENNKLIVRRGQSFYVQIDFSRPYDPRRDLFRVEYVIGRYPQENKGTYIPVPIVSELQSGKWGAKIVMREDRSVRLSIQSSPKCIVGKFRMYVAVWTPYGVLRTSRNPETDTYILFNPWCEDDAVYLDNEKEREEYVLNDIGVIFYGEVNDIKTRSWSYGQFEDGILDTCLYVMDRAQMDLSGRGNPIKVSRVGSAMVNAKDDEGVLVGSWDNIYAYGVPPSAWTGSVDILLEYRSSENPVRYGQCWVFAGVFNTFLRCLGIPARIVTNYFSAHDNDANLQMDIFLEEDGNVNSKLTKDSVWNYHCWNEAWMTRPDLPVGFGGWQAVDSTPQENSDGMYRCGPASVQAIKHGHVCFQFDAPFVFAEVNSDLIYITAKKDGTHVVENVDATHIGKLIVTKQIGGDGMMDITDTYKFQEGQEEERLALETALMYGAKKPLNTEGVMKSRSNVDMDFEVENAVLGKDFKLSITFRNNSHNRYTITAYLSANITFYTGVPKAEFKKETFDVTLEPLSFKKEAVLIQAGEYMGQLLEQASLHFFVTARINETRDVLAKQKSTVLTIPEIIIKVRGTQVVGSDMTVTVEFTNPLKETLRNVWVHLDGPGVTRPMKKMFREIRPNSTVQWEEVCRPWVSGHRKLIASMSSDSLRHVYGELDVQIQRRPSM

SEQ ID NO: 195 - DNA, 2725 bp, Homo sapiens
  CDS (169)..(1335)
agtaagcactctcccttgtcgtggaggtgggcaaatctttatcagccactgccttctgctgccaggaagccagctagagtggtctttaaagaaaactgggcatctcctgctacttaaaatcaaaaactacctaaaataaagattatagagccagaggaagagatagccatggaggacagccccactatggttagagtggacagccccactatggttaggggtgaaaaccaggtttcgccatgtcaagggagaaggtgcttccccaaagctcttggctatgtcaccggtgacatgaaagaacttgccaaccagcttaaagacaaacccgtggtgctccagttcattgactggattctccggggcatatcccaagtggtgttcgtcaacaaccccgtcagtggaatcctgattctggtaggacttcttgttcagaacccctggtgggctctcactggctggctgggaacagtggtctccactctgatggccctcttgctcagccaggacaggtcattaatagcatctgggctctatggctacaatgccaccctggtgggagtactcatggctgtcttttcggacaagggagactatttctggtggctgttactccctgtatgtgctatgtccatgacttgcccaattttctcaagtgcattgaattccatgctcagcaaatgggacctccccgtcttcaccctccctttcaacatggcgttgtcaatgtacctttcagccacaggacattacaatccgttctttccagccaaactggtcatacctataactacagctccaaatatctcctggtctgacctcagtgccctggagttgttgaaatctataccagtgggagttggtcagatctatggctgtgataatccatggacagggggcattttcctgggagccatcctactctcctccccactcatgtgcctgcatgctgccataggatcattgctgggcatagcagcgggactcagtctttcagccccatttgagaacatctactttggactctggggtttcaacagctctctggcctgcattgcaatgggaggaatgttcatggcgctcacctggcaaacccacctcctggctcttggctgtgccctgttcacggcctatcttggagtcggcatggcaaactttatggctgaggttggattgccagcttgtacctggcccttctgtttggccacgctattgttcctcatcatgaccacaaaaaattccaacatctacaagatgcccctcagtaaagttacttatcctgaagaaaaccgcatcttctacctgcaagccaagaaaagaatggtggaaagccctttgtgagaacaagccccatttgcagccatggtcacgagtcatttctgcctgactgctccagctaacttccagggtctcagcaaactgctgtttttcacgagtatcaactttcatactgacgcgtctgtaatctgttcttatgctcattttgtattttcctttcaactccaggaatatccttgagcatatgagagtcacatccaggtgatgtgctctggtatggaatttgaaaccccaatggggccttggcactaagactggaatgtatataaagtcaaagtgctccaacagaaggaggaagtgaaaacaaactattagtatttattgatattcttggtgtttagctggctcgatgatgttaacagtattaaaaattaaacccccataaacccaacctaagcctatggaatccacagtcacaaaatcgaagttaacccagaatctgtgataagcagcttggctttttttttaaatcaatgcaagtacaccattatagccagaatctgtatcacagaggtgcaagctgacagcagagctcagtccccacttcctgcaaacaatggcctgcaccctatcccttgtgtgtgtgacattctctcatgggacaatgttggggtttttcagactgacaggactgcaagagggagaaaggaattttgtcaatcaaaattattctgtattgcaacttttctcagagattgcaaaggattttttaggtagagattatttttccttatgaaaaatgatctgttttaaatgagataaaataggagaagttcctggcttaacctgttcttacatattaaagaaaagttacttactgtatttatgaaatactcagcttaggcatttttactttaacccctaaattgattttgtaaatgccacaaatgcatagaattgttaccaacctccaaagggctctttaaaatcatatttttttattcatttgaggatgtcttataaagactgaaggcaaaggtcagaatgcttacgggtgttatttttataagttgttgaattccttaatttagaaaagctcattattttttgcacactcacaatattctctctcagaaatcaatggcatttgaaccaccaaaaagaaataaagggctgagtgtggtgctcacgcctgtaatcccagcactttggggagcccaggcgggcagattgcttgaacccaggagttcaagaccagcctgggcagcatggtgaaaccctgtatctacaaaaaatacaaaaattagccaggcatggtggtgggtgcctgtagttccagctacttgggaggctgaggtgggaaaatgacttgagcccaggaggaggaggctgcagtgagctaagattgcaccactgcactccaacctgggtgacaagagtgaaactgaat

SEQ ID NO: 196 - protein, 389 aa, Homo sapiens
MEDSPTMVRVDSPTMVRGENQVSPCQGRRCFPKALGYVTGDMKELANQLKDKPVVLQFIDWILRGISQVVFVNNPVSGILILVGLLVQNPWWALTGWLGTVVSTLMALLLSQDRSLIASGLYGYNATLVGVLMAVFSDKGDYFWWLLLPVCAMSMTCPIFSSALNSMLSKWDLPVFTLPFNMALSMYLSATGHYNPFFPAKLVIPITTAPNISWSDLSALELLKSIPVGVGQIYGCDNPWTGGIFLGAILLSSPLMCLHAAIGSLLGIAAGLSLSAPFENIYFGLWGFNSSLACIAMGGMFMALTWQTHLLALGCALFTAYLGVGMANFMAEVGLPACTWPFCLATLLFLIMTTKNSNIYKMPLSKVTYPEENRIFYLQAKKRMVESPL

SEQ ID NO: 197 - DNA, 3132 bp, Homo sapiens; identical to SEQ ID NO: 183
  CDS (271)..(1899)

SEQ ID NO: 198 - protein, 543 aa, Homo sapiens; identical to SEQ ID NO: 184

SEQ ID NO: 199 - DNA, 1567 bp, Homo sapiens; identical to SEQ ID NO: 166
  CDS (951)..(1022)

SEQ ID NO: 200 - protein, 24 aa, Homo sapiens
MAPRGFSCLLLLTSEIDLPVKRRA

SEQ ID NO: 201 - DNA, 2619 bp, Homo sapiens
  CDS (295)..(2427)
gactcctaggggcttgcagacctagtgggagagaaagaacatcgcagcagccaggcagaaccaggacaggtgaggtgcaggctggctttcctctcgcagcgcggtgtggagtcctgtcctgcctcagggcttttcggagcctggatcctcaaggaacaagtagacctggccgcggggagtggggagggaaggggtgtctattgggcaacagggcggcaaagccctgaataaaggggcgcagggcaggcgcaagtgcagagccttcgtttgccaagtcgcctccagaccgcagacatgaaacttgtcttcctcgtcctgctgttcctcggggccctcggactgtgtctggctggccgtaggagaaggagtgttcagtggtgcgccgtatcccaacccgaggccacaaaatgcttccaatggcaaaggaatatgagaaaagtgcgtggccctcctgtcagctgcataaagagagactcccccatccagtgtatccaggccattgcggaaaacagggccgatgctgtgacccttgatggtggtttcatatacgaggcaggcctggccccctacaaactgcgacctgtagcggcggaagtctacgggaccgaaagacagccacgaactcactattatgccgtggctgtggtgaagaagggcggcagctttcagctgaacgaactgcaaggtctgaagtcctgccacacaggccttcgcaggaccgctggatggaatgtccctacagggacacttcgtccattcttgaattggacgggtccacctgagcccattgaggcagctgtggccaggttcttctcagccagctgtgttcccggtgcagataaaggacagttccccaacctgtgtcgcctgtgtgcggggacaggggaaaacaaatgtgccttctcctcccaggaaccgtacttcagctactctggtgccttcaagtgtctgagagacggggctggagacgtggcttttatcagagagagcacagtgtttgaggacctgtcagacgaggctgaaagggacgagtatgagttactctgcccagacaacactcggaagccagtggacaagttcaaagactgccatctggcccgggtcccttctcatgccgttgtggcacgaagtgtgaatggcaaggaggatgccatctggaatcttctccgccaggcacaggaaaagtttggaaaggacaagtcaccgaaattccagctctttggctcccctagtgggcagaaagatctgctgttcaaggactctgccattgggttttcgagggtgcccccgaggatagattctgggctgtaccttggctccggctacttcactgccatccagaacttgaggaaaagtgaggaggaagtggctgcccggcgtgcgcgggtcgtgtggtgtgcggtgggcgagcaggagctgcgcaagtgtaaccagtggagtggcttgagcgaaggcagcgtgacctgctcctcggcctccaccacagaggactgcatcgccctggtgctgaaaggagaagctgatgccatgagtttggatggaggatatgtgtacactgcatgcaaatgtggtttggtgcctgtcctggcagagaactacaaatcccaacaaagcagtgaccctgatcctaactgtgtggatagacctgtggaaggatatcttgctgtggcggtggttaggagatcagacactagccttacctggaactctgtgaaaggcaagaagtcctgccacaccgccgtggacaggactgcaggctggaatatccccatgggcctgctcttcaaccagacgggctcctgcaaatttgatgaatatttcagtcaaagctgtgcccctgggtctgacccgagatctaatctctgtgctctgtgtattggcgacgagcagggtgagaataagtgcgtgcccaacagcaacgagagatactacggctacactggggctttccggtgcctggctgagaatgctggagacgttgcatttgtgaaagatgtcactgtcttgcagaacactgatggaaataacaatgaggcatgggctaaggatttgaagctggcagactttgcgctgctgtgcctcgatggcaaacggaagcctgtgactgaggctagaagctgccatcttgccatggccccgaatcatgccgtggtgtctcggatggataaggtggaacgcctgaaacaggtgctgctccaccaacaggctaaatttgggagaaatggatctgactgcccggacaagttttgcttattccagtctgaaaccaaaaaccttctgttcaatgacaacactgagtgtctggccagactccatggcaaaacaacatatgaaaaatatttgggaccacagtatgtcgcaggcattactaatctgaaaaagtgctcaacctcccccctcctggaagcctgtgaattcctcaggaagtaaaaccgaagaagatggcccagctccccaagaaagcctcagccattcactgcccccagctcttctccccaggtgtgttggggccttggctcccctgctgaaggtggggattgcccatccatctgcttacaattccctgctgtcgtcttagcaagaagtaaaatgagaaattttgttgatattcaaaaaaaa

SEQ ID NO: 202 - protein, 711 aa, Homo sapiens
MKLVFLVLLFLGALGLCLAGRRRRSVQWCAVSQPEATKCFQWQRNMRKVRGPPVSCIKRDSPIQCIQAIAENRADAVTLDGGFIYEAGLAPYKLRPVAAEVYGTERQPRTHYYAVAVVKKGGSFQLNELQGLKSCHTGLRRTAGWNVPTGTLRPFLNWTGPPEPIEAAVARFFSASCVPGADKGQFPNLCRLCAGTGENKCAFSSQEPYFSYSGAFKCLRDGAGDVAFIRESTVFEDLSDEAERDEYELLCPDNTRKPVDKFKDCHLARVPSHAVVARSVNGKEDAIWNLLRQAQEKFGKDKSPKFQLFGSPSGQKDLLFKDSAIGFSRVPPRIDSGLYLGSGYFTAIQNLRKSEEEVAARRARVVWCAVGEQELRKCNQWSGLSEGSVTCSSASTTEDCIALVLKGEADAMSLDGGYVYTACKCGLVPVLAENYKSQQSSDPDPNCVDRPVEGYLAVAVVRRSDTSLTWNSVKGKKSCHTAVDRTAGWNIPMGLLFNQTGSCKFDEYFSQSCAPGSDPRSNLCALCIGDEQGENKCVPNSNERYYGYTGAFRCLAENAGDVAFVKDVTVLQNTDGNNNEAWAKDLKLADFALLCLDGKRKPVTEARSCHLAMAPNHAVVSRMDKVERLKQVLLHQQAKFGRNGSDCPDKFCLFQSETKNLLFNDNTECLARLHGKTTYEKYLGPQYVAGITNLKKCSTSPLLEACEFLRK

SEQ ID NO: 203 - DNA, 2575 bp, Homo sapiens
  CDS (214)..(2160)
gcgtcgacagcaggacaagctcagcctgcagctgccgtgggctttgtgtggactggacgcagagcttgggagacgggggagggctattactccaattcactgtcaatggaattacagctatagcggcagtgtatataggattgctttttctcgtcttcctgggttctgaagtaacggaagctaccttgtataaagacctcaacactgctgaccatgatcagcgcagcctggagcatcttcctcatcgggactaaaattgggctgttccttcaagtagcacctctatcagttatggctaaatcctgtccatctgtgtgtcgctgcgatgcgggtttcatttactgtaatgatcgctttctgacatccattccaacaggaataccagaggatgctacaactctctaccttcagaacaaccaaataaataatgctgggattccttcagatttgaaaaacttgctgaaagtagaaagaatatacctataccacaacagtttagatgaatttcctaccaacctcccaaagtatgtaaaagagttacatttgcaagaaaataacataaggactatcacttatgattcactttcaaaaattccctatctggaagaattacatttagatgacaactctgtctctgcagttagcatagaagagggagcattccgagacagcaactatctccgactgcttttcctgtcccgtaatcaccttagcacaattccctggggtttgcccaggactatagaagaactacgcttggatgataatcgcatatccactatttcatcaccatctcttcaaggtctcactagtctaaaacgcctggttctagatggaaacctgttgaacaatcatggtttaggtgacaaagttttcttcaacctagttaatttgacagagctgtccctggtgcggaattccctgactgctgcaccagtaaaccttccaggcacaaacctgaggaagctttatcttcaagataaccacatcaatcgggtgcccccaaatgctttttcttatctaaggcagctctatcgactggatatgtccaataataacctaagtaatttacctcagggtatctttgatgatttggacaatataacacaactgattcttcgcaacaatccctggtattgcgggtgcaagatgaaatgggtacgtgactggttacaatcactacctgtgaaggtcaacgtgcgtgggctcatgtgccaagccccagaaaaggttcgtgggatggctattaaggatctcaatgcagaactgtttgattgtaaggacagtgggattgtaagcaccattcagataaccactgcaatacccaacacagtgtatcctgcccaaggacagtggccagctccagtgaccaaacagccagatattaagaaccccaagctcactaaggatcaccaaaccacagggagtccctcaagaaaaacaattacaattactgtgaagtctgtcacttctgataccattcatatctcttggaaacttgctctacctatgactgctttgagactcagctggcttaaactgggccatagcccggcatttggatctataacagaaacaattgtaacaggggaacgcagtgagtacttggtcacagccctggagcctgattcaccctataaagtatgcatggttcccatggaaaccagcaacctctacctatttgatgaaactcctgtttgtattgagactgaaactgcaccccttcgaatgtacaaccctacaaccaccctcaatcgagagcaagagaaagaaccttacaaaaaccccaatttacctttggctgccatcattggtggggctgtggccctggttaccattgcccttcttgctttagtgtgttggtatgttcataggaatggatcgctcttctcaaggaactgtgcatatagcaaagggaggagaagaaaggatgactatgcagaagctggcactaagaaggacaactctatcctggaaatcagggaaacttcttttcagatgttaccaataagcaatgaacccatctcgaaggaggagtttgtaatacacaccatatttcctcctaatggaatgaatctgtacaaaaacaatcacagtgaaagcagtagtaaccgaagctacagagacagtggtattccagactcagatcactcacactcatgatgctgaaggactcacagcagacttgtgttttgggttttttaaacctaagggaggtgatggtaggaaccctgttctactgcaaaacactggaaaaagagactgaaaaaaagcaatgtactgtacatttgccatataatttatatttaagaactttttattaaaagtttcaaatttcaggttactgctgcgattgatgtagtggagatgcctgaacacaattctatattttagtattttttagtaatttgtactgtattttccttgcaaatattggagttataaaccatttactttgtgttctactgagtaagatgacttgttgactgtgaaagtgaattttcttgctgtgtcgaacaatcaggactgcattcatatgagatccttgtagtataagcacaggccatttttcagt

SEQ ID NO: 204 - protein, 649 aa, Homo sapiens
MISAAWSIFLIGTKIGLFLQVAPLSVMAKSCPSVCRCDAGFIYCNDRFLTSIPTGIPEDATTLYLQNNQINNAGIPSDLKNLLKVERIYLYHNSLDEFPTNLPKYVKELHLQENNIRTITYDSLSKIPYLEELHLDDNSVSAVSIEEGAFRDSNYLRLLFLSRNHLSTIPWGLPRTIEELRLDDNRISTISSPSLQGLTSLKRLVLDGNLLNNHGLGDKVFFNLVNLTELSLVRNSLTAAPVNLPGTNLRKLYLQDNHINRVPPNAFSYLRQLYRLDMSNNNLSNLPQGIFDDLDNITQLILRNNPWYCGCKMKWVRDWLQSLPVKVNVRGLMCQAPEKVRGMAIKDLNAELFDCKDSGIVSTIQITTAIPNTVYPAQGQWPAPVTKQPDIKNPKLTKDHQTTGSPSRKTITITVKSVTSDTIHISWKLALPMTALRLSWLKLGHSPAFGSITETIVTGERSEYLVTALEPDSPYKVCMVPMETSNLYLFDETPVCIETETAPLRMYNPTTTLNREQEKEPYKNPNLPLAAIIGGAVALVTIALLALVCWYVHRNGSLFSRNCAYSKGRRRKDDYAEAGTKKDNSILEIRETSFQMLPISNEPISKEEFVIHTIFPPNGMNLYKNNHSESSSNRSYRDSGIPDSDHSHS

SEQ ID NO: 205 - DNA, 2575 bp, Homo sapiens; identical to SEQ ID NO: 203
  CDS (214)..(2160)

SEQ ID NO: 206 - protein, 649 aa, Homo sapiens; identical to SEQ ID NO: 204

SEQ ID NO: 207 - DNA, 3737 bp, Homo sapiens
  CDS (81)..(3077)
ggcgtccgcgcacacctccccgcgccgccgccgccaccgcccgcactccgccgcctctgcccgcaaccgctgagccatccatgggggtcgcgggccgcaaccgtcccggggcggcctgggcggtgctgctgctgctgctgctgctgccgccactgctgctgctggcgggggccgtcccgccgggtcggggccgtgccgcggggccgcaggaggatgtagatgagtgtgcccaagggctagatgactgccatgccgacgccctgtgtcagaacacacccacctcctacaagtgctcctgcaagcctggctaccaaggggaaggcaggcagtgtgaggacatcgatgaatgtggaaatgagctcaatggaggctgtgtccatgactgtttgaatattccaggcaattatcgttgcacttgttttgatggcttcatgttggctcatgacggtcataattgtcttgatgtggacgagtgcctggagaacaatggcggctgccagcatacctgtgtcaacgtcatggggagctatgagtgctgctgcaaggaggggtttttcctgagtgacaatcagcacacctgcattcaccgctcggaagagggcctgagctgcatgaataaggatcacggctgtagtcacatctgcaaggaggccccaaggggcagcgtcgcctgtgagtgcaggcctggttttgagctggccaagaaccagagagactgcatcttgacctgtaaccatgggaacggtgggtgccagcactcctgtgacgatacagccgatggcccagagtgcagctgccatccacagtacaagatgcacacagatgggaggagctgccttgagcgagaggacactgtcctggaggtgacagagagcaacaccacatcagtggtggatggggataaacgggtgaaacggcggctgctcatggaaacgtgtgctgtcaacaatggaggctgtgaccgcacctgtaaggatacttcgacaggtgtccactgcagttgtcctgttggattcactctccagttggatgggaagacatgtaaagatattgatgagtgccagacccgcaatggaggttgtgatcatttctgcaaaaacatcgtgggcagttttgactgcggctgcaagaaaggatttaaattattaacagatgagaagtcttgccaagatgtggatgagtgctctttggataggacctgtgaccacagctgcatcaaccaccctggcacatttgcttgtgcttgcaaccgagggtacaccctgtatggcttcacccactgtggagacaccaatgagtgcagcatcaacaacggaggctgtcagcaggtctgtgtgaacacagtgggcagctatgaatgccagtgccaccctgggtacaagctccactggaataaaaaagactgtgtggaagtgaaggggctcctgcccacaagtgtgtcaccccgtgtgtccctgcactgcggtaagagtggtggaggagacgggtgcttcctcagatgtcactctggcattcacctctcttcagatgtcaccaccatcaggacaagtgtaacctttaagctaaatgaaggcaagtgtagtttgaaaaatgctgagctgtttcccgagggtctgcgaccagcactaccagagaagcacagctcagtaaaagagagcttccgctacgtaaaccttacatgcagctctggcaagcaagtcccaggagcccctggccgaccaagcacccctaaggaaatgtttatcactgttgagtttgagcttgaaactaaccaaaaggaggtgacagcttcttgtgacctgagctgcatcgtaaagcgaaccgagaagcggctccgtaaagccatccgcacgctcagaaaggccgtccacagggagcagtttcacctccagctctcaggcatgaacctcgacgtggctaaaaagcctcccagaacatctgaacgccaggcagagtcctgtggagtgggccagggtcatgcagaaaaccaatgtgtcagttgcagggctgggacctattatgatggagcacgagaacgctgcattttatgtccaaatggaaccttccaaaatgaggaaggacaaatgacttgtgaaccatgcccaagaccaggaaattctggggccctgaagaccccagaagcttggaatatgtctgaatgtggaggtctgtgtcaacctggtgaatattctgcagatggctttgcaccttgccagctctgtgccctgggcacgttccagcctgaagctggtcgaacttcctgcttcccctgtggaggaggccttgccaccaaacatcagggagctacttcctttcaggactgtgaaaccagagttcaatgttcacctggacatttctacaacaccaccactcaccgatgtattcgttgcccagtgggaacataccagcctgaatttggaaaaaataattgtgtttcttgcccaggaaatactacgactgactttgatggctccacaaacataacccagtgtaaaaacagaagatgtggaggggagctgggagatttcactgggtacattgaatccccaaactacccaggcaattacccagccaacaccgagtgtacgtggaccatcaacccaccccccaagcgccgcatcctgatcgtggtccctgagatcttcctgcccatagaggacgactgtggggactatctggtgatgcggaaaacctcttcatccaattctgtgacaacatatgaaacctgccagacctacgaacgccccatcgccttcacctccaggtcaaagaagctgtggattcagttcaagtccaatgaagggaacagcgctagagggttccaggtcccatacgtgacatatgatgaggactaccaggaactcattgaagacatagttcgagatggcaggctctatgcatctgagaaccatcaggaaatacttaaggataagaaacttatcaaggctctgtttgatgtcctggcccatccccagaactatttcaagtacacagcccaggagtcccgagagatgtttccaagatcgttcatccgattgctacgttccaaagtgtccaggtttttgagaccttacaaatgactcagcccacgtgccactcaatacaaatgttctgctatagggttggtgggacagagctgtcttccttctgcatgtcagcacagtcgggtattgctgcctcccgtatcagtgactcattagagttcaatttttatagataatacagatattttggtaaattgaacttggtttttctttcccagcatcgtggatgtagactgagaatggctttgagtggcatcagcttctcactgctgtgggcggatgtcttggatagatcacgggctggctgagctggactttggtcagcctaggtgagactcacctgtccttctggggtcttactcctcctcaaggagtctgtagtggaaaggaggccacagaataagctgcttattctgaaacttcagcttcctctagcccggccctctctaagggagccctctgcactcgtgtgcaggctctgaccaggcagaacaggcaagaggggagggaaggagacccctgcaggctccctccacccaccttgagacctgggaggactcagtttctccacagccttctccagcctgtgtgatacaagtttgatcccaggaacttgagttctaagcagtgctcgtgaaaaaaaaaagcagaaagaattagaaataaataaaaactaagcacttctggagacat

SEQ ID NO: 208 - protein, 999 aa, Homo sapiens
MGVAGRNRPGAAWAVLLLLLLLPPLLLLAGAVPPGRGRAAGPQEDVDECAQGLDDCHADALCQNTPTSYKCSCKPGYQGEGRQCEDIDECGNELNGGCVHDCLNIPGNYRCTCFDGFMLAHDGHNCLDVDECLENNGGCQHTCVNVMGSYECCCKEGFFLSDNQHTCIHRSEEGLSCMNKDHGCSHICKEAPRGSVACECRPGFELAKNQRDCILTCNHGNGGCQHSCDDTADGPECSCHPQYKMHTDGRSCLEREDTVLEVTESNTTSVVDGDKRVKRRLLMETCAVNNGGCDRTCKDTSTGVHCSCPVGFTLQLDGKTCKDIDECQTRNGGCDHFCKNIVGSFDCGCKKGFKLLTDEKSCQDVDECSLDRTCDHSCINHPGTFACACNRGYTLYGFTHCGDTNECSINNGGCQQVCVNTVGSYECQCHPGYKLHWNKKDCVEVKGLLPTSVSPRVSLHCGKSGGGDGCFLRCHSGIHLSSDVTTIRTSVTFKLNEGKCSLKNAELFPEGLRPALPEKHSSVKESFRYVNLTCSSGKQVPGAPGRPSTPKEMFITVEFELETNQKEVTASCDLSCIVKRTEKRLRKAIRTLRKAVHREQFHLQLSGMNLDVAKKPPRTSERQAESCGVGQGHAENQCVSCRAGTYYDGARERCILCPNGTFQNEEGQMTCEPCPRPGNSGALKTPEAWNMSECGGLCQPGEYSADGFAPCQLCALGTFQPEAGRTSCFPCGGGLATKHQGATSFQDCETRVQCSPGHFYNTTTHRCIRCPVGTYQPEFGKNNCVSCPGNTTTDFDGSTNITQCKNRRCGGELGDFTGYIESPNYPGNYPANTECTWTINPPPKRRILIVVPEIFLPIEDDCGDYLVMRKTSSSNSVTTYETCQTYERPIAFTSRSKKLWIQFKSNEGNSARGFQVPYVTYDEDYQELIEDIVRDGRLYASENHQEILKDKKLIKALFDVLAHPQNYFKYTAQESREMFPRSFIRLLRSKVSRFLRPYK

SEQ ID NO: 209 - DNA, 1521 bp, Homo sapiens
  CDS (12)..(1280)
cagagttgagaatggagagaatgttacctctcctggctctggggctcttggcggctgggttctgccctgctgtcctctgccaccctaacagcccacttgacgaggagaatctgacccaggagaaccaagaccgagggacacacgtggacctcggattagcctccgccaacgtggacttcgctttcagcctgtacaagcagttagtcctgaaggcccctgataagaatgtcatcttctccccactgagcatctccaccgccttggccttcctgtctctgggggcccataataccaccctgacagagattctcaaaggcctcaagttcaacctcacggagacttctgaggcagaaattcaccagagcttccagcacctcctgcgcaccctcaatcagtccagcgatgagctgcagctgagtatgggaaatgccatgtttgtcaaagagcaactcagtctgctggacaggttcacggaggatgccaagaggctgtatggctccgaggcctttgccactgactttcaggactcagctgcagctaagaagctcatcaacgactacgtgaagaatggaactagggggaaaatcacagatctgatcaaggaccttgactcgcagacaatgatggtcctggtgaattacatcttctttaaagccaaatgggagatgccctttgacccccaagatactcatcagtcaaggttctacttgagcaagaaaaagtgggtaatggtgcccatgatgagtttgcatcacctgactataccttacttccgggacgaggagctgtcctgcaccgtggtggagctgaagtacacaggcaatgccagcgcactcttcatcctccctgatcaagacaagatggaggaagtggaagccatgctgctcccagagaccctgaagcggtggagagactctctggagttcagagagataggtgagctctacctgccaaagttttccatctcgagggactataacctgaacgacatacttctccagctgggcattgaggaagccttcaccagcaaggctgacctgtcagggatcacaggggccaggaacctagcagtctcccaggtggtccataaggctgtgcttgatgtatttgaggagggcacagaagcatctgctgccacagcagtcaaaatcaccctcctttctgcattagtggagacaaggaccattgtgcgtttcaacaggcccttcctgatgatcattgtccctacagacacccagaacatcttcttcatgagcaaagtcaccaatcccaagcaagcctagagcttgccatcaagcagtggggctctcagtaaggaacttggaatgcaagctggatgcctgggtctctgggcacagcctggcccctgtgcaccgagtggccatggcatgtgtggccctgtctgcttatccttggaaggtgacagcgattccctgtgtagctctcacatgcacaggggcccatggactcttcagtctggagggtcctgggcctcctgacagcaataaataatttcgttgg

SEQ ID NO: 210 - protein, 423 aa, Homo sapiens
MERMLPLLALGLLAAGFCPAVLCHPNSPLDEENLTQENQDRGTHVDLGLASANVDFAFSLYKQLVLKAPDKNVIFSPLSISTALAFLSLGAHNTTLTEILKGLKFNLTETSEAEIHQSFQHLLRTLNQSSDELQLSMGNAMFVKEQLSLLDRFTEDAKRLYGSEAFATDFQDSAAAKKLINDYVKNGTRGKITDLIKDLDSQTMMVLVNYIFFKAKWEMPFDPQDTHQSRFYLSKKKWVMVPMMSLHHLTIPYFRDEELSCTVVELKYTGNASALFILPDQDKMEEVEAMLLPETLKRWRDSLEFREIGELYLPKFSISRDYNLNDILLQLGIEEAFTSKADLSGITGARNLAVSQVVHKAVLDVFEEGTEASAATAVKITLLSALVETRTIVRFNRPFLMIIVPTDTQNIFFMSKVTNPKQA

SEQ ID NO: 211 - DNA, 2221 bp, Homo sapiens
  CDS (1021)..(1218)
ataaccatgcacactactataaccaccctaaccctgacttccctaattccccccatccttaccaccctcgttaaccctaacaaaaaaaactcatacccccattatgtaaaatccattgtcgcatccacctttattatcagtctcttccccacaacaatattcatgtgcctagaccaagaagttattatctcgaactgacactgagccacaacccaaacaacccagctctccctaagcttcaaactagactacttctccataatattcatccctgtagcattgttcgttacatggtccatcatagaattctcactgtgatatataaactcagacccaaacattaatcagttcttcaaatatctactcatcttcctaattaccatactaatcttagttaccgctaacaacctattccaactgttcatcggctgagagggcgtaggaattatatccttcttgctcatcagttgatgatacgcccgagcagatgccaacacagcagccattcaagcaatcctatacaaccgtatcggcgatatcggtttcatcctcgccttagcatgatttatcctacactccaactcatgagacccacaacaaatagcccttctaaacgctaatccaagcctcaccccactactaggcctcctcctagcagcagcaggcaaatcagcccaattaggtctccacccctgactcccctcagccatagaaggccccaccccagtctcagccctactccactcaagcactatagttgtagcaggaatcttcttactcatccgcttccaccccctagcagaaaatagcccactaatccaaactctaacactatgcttaggcgctatcaccactctgttcgcagcagtctgcgcccttacacaaaatgacatcaaaaaaatcgtagccttctccacttcaagtcaactaggactcataatagttacaatcggcatcaaccaaccacacctagcattcctgcacatctgtacccacgccttcttcaaagccatactatttatgtgctccgggtccatcatccacaaccttaacaatgaacaagatattcgaaaaataggaggactactcaaaaccatacctctcacttcaacctccctcaccattggcagcctagcattagcaggaatacctttcctcacaggtttctactccaaagaccacatcatcgaaaccgcaaacatatcatacacaaacgcctgagccctatctattactctcatcgctacctccctgacaagcgcctatagcactcgaataattcttctcaccctaacaggtcaacctcgcttccccacccttactaacattaacgaaaataaccccaccctactaaaccccattaaacgcctggcagccggaagcctattcgcaggatttctcattactaacaacatttcccccgcatcccccttccaaacaacaatccccctctacctaaaactcacagccctcgctgtcactttcctaggacttctaacagccctagacctcaactacctaaccaacaaacttaaaataaaatccccactatgcacattttatttctccaacatactcggattctaccctagcatcacacaccgcacaatcccctatctaggccttcttacgagccaaaacctgcccctactcctcctagacctaacctgactagaaaagctattacctaaaacaatttcacagcaccaaatctccacctccatcatcacctcaacccaaaaaggcataattaaactttacttcctctctttcttcttcccactcatcctaaccctactcctaatcacataacctattcccccgagcaatctcaattacaatatatacaccaacaaacaatgttcaaccagtaactactactaatcaacgcccataatcatacaaagcccccgcaccaataggatcctcccgaatcaaccctgacccctctccttcataaattattcagcttcctacactattaaagtttaccacaaccaccaccccatcatactctttcacccacagcaccaatcctacctccatcgctaaccccactaaaacactcaccaagacctcaacccctgacccccatgcctcaggatactcctcaatagccatcgctgtagtatatccaaagacaaccatcattccccctaaataaattaaaaaaactattaaacccatataacctcccccaaaaaaaaaaaaaaaaaaaaaa

SEQ ID NO: 212 - protein, 66 aa, Homo sapiens [sequence omitted]

SEQ ID NO: 213 - DNA, 3089 bp, Homo sapiens
  CDS (43)..(1200)
agcagttcctcctaactcctgccagaaacagctctcctcaacatgagagctgcacccctcctcctggccagggcagcaagccttagccttggcttcttgtttctgctttttttctggctagaccgaagtgtactagccaaggagttgaagtttgtgactttggtgtttcggcatggagaccgaagtcccattgacacctttcccactgaccccataaaggaatcctcatggccacaaggatttggccaactcacccagctgggcatggagcagcattatgaacttggagagtatataagaaagagatatagaaaattcttgaatgagtcctataaacatgaacaggtttatattcgaagcacagacgttgaccggactttgatgagtgctatgacaaacctggcagccctgtttcccccagaaggtgtcagcatctggaatcctatcctactctggcagcccatcccggtgcacacagttcctctttctgaagatcagttgctatacctgcctttcaggaactgccctcgttttcaagaacttgagagtgagactttgaaatcagaggaattccagaagaggctgcacccttataaggattttatagctaccttgggaaaactttcaggattacatggccaggacctttttggaatttggagtaaagtctacgaccctttatattgtgagagtgttcacaatttcactttaccctcctgggccactgaggacaccatgactaagttgagagaattgtcagaattgtccctcctgtccctctatggaattcacaagcagaaagagaaatctaggctccaagggggtgtcctggtcaatgaaatcctcaatcacatgaagagagcaactcagataccaagctacaaaaaacttatcatgtattctgcgcatgacactactgtgagtggcctacagatggcgctagatgtttacaacggactccttcctccctatgcttcttgccacttgacggaattgtactttgagaagggggagtactttgtggagatgtactaccggaatgagacgcagcacgagccgtatcccctcatgctacctggctgcagccccagctgtcctctggagaggtttgctgagctggttggccctgtgatccctcaagactggtccacggagtgtatgaccacaaacagccatcaaggtactgaggacagtacagattagtgtgcacagagatctctgtagaaagagtagctgccctttctcagggcagatgatgctttgagaacatactttggccattaccccccagctttgaggaaaatgggctttggatgattattttatgttttagggacccccaacctcaggcaattcctacctcttcacctgaccctgcccccacttgccataaaacttagctaagttttgttttgtttttcagcgttaatgtaaaggggcagcagtgccaaaatataatcagagataaagcttaggtcaaagttcatagagttcccatgaactatatgactggccacacaggatcttttgtatttaaggattctgagattttgcttgagcaggattagataagtctgttctttaaatttctgaaatggaacagatttcaaaaaaaattcccacaatctagggtgggaacaaggaaggaaagatgtgaataggctgatggggaaaaaaccaatttacccatcagttccagccttctctcaaggagaggcaaagaaaggagatacagtggagacatctggaaagttttctccactggaaaactgctactatctgtttttatatttctgttaaaatatatgaggctacagaactaaaaattaaaacctctttgtgtcccttggtcctggaacatttatgttccttttaaagaaacaaaaatcaaactttacagaaagatttgatgtatgtaatacatatagcagctcttgaagtatatatatcatagcaaataagtcatctgatgagaacaagctatttgggcacaacacatcaggaaagagagcaccacgtgatggagtttctccagaagctccagtgataagagatgttgactctaaagttgatttaaggccaggcatggtggtttacgcctataatcccagcattttgggactccgaggtgggcagatcacttgagctcaggagctcaagatcagcctgggcaacatggtgaaaccttgtctctacataaaatacaaaaacttagatgggcatggtgctgtgtgcctatagtccactacttgtggggctaaggcaggaggatcacttgagccccggaggtcgaggctacagtgacccaagagtgcactactgtactccagccagggcaagagagcgagaccctgtctcaataaataaataaataaataaataaataaataaataaaaacaaagttgattaagaaaggaagtataggccaggcacagtggctcacacctgtaatccttgcattttggaaggctgaggcaggaggatcactttaggcctggtgtgttcaagaccagcctggtcaacatagtgagacactgtctctaccaaaaaaaggaaggaagggacacatatcaaactgaaacaaaattagaaatgtaattatgttatgttctaagtgcctccaagttcaaaacttattggaatgttgagagtgtggttacgaaatacgttaggaggacaaaaggaatgtgtaagtctttaatgccgatatcttcagaaaacctaagcaaacttacaggtcctgctgaaactgcccactctgcaagaagaaatcatgatatagctttccatgtggcagatctacatgtctagagaacactgtgctctattaccattatggataaagatgagatggtttctagagatggtttctactggctgccagaatctagagcaaagccatcccccctcctggttggtcacagaatgactgacaaagacatcgattgatatgcttctttgtgttatttccctcccaagtaaatgtttgtccttgggtccattttctatgcttgtaactgtcttctagcagtgagccaaatgtaaaatagtgaataaagtcattattaggaagttcaaaaaaaaaaaa

SEQ ID NO: 214 - protein, 386 aa, Homo sapiens
MRAAPLLLARAASLSLGFLFLLFFWLDRSVLAKELKFVTLVFRHGDRSPIDTFPTDPIKESSWPQGFGQLTQLGMEQHYELGEYIRKRYRKFLNESYKHEQVYIRSTDVDRTLMSAMTNLAALFPPEGVSIWNPILLWQPIPVHTVPLSEDQLLYLPFRNCPRFQELESETLKSEEFQKRLHPYKDFIATLGKLSGLHGQDLFGIWSKVYDPLYCESVHNFTLPSWATEDTMTKLRELSELSLLSLYGIHKQKEKSRLQGGVLVNEILNHMKRATQIPSYKKLIMYSAHDTTVSGLQMALDVYNGLLPPYASCHLTELYFEKGEYFVEMYYRNETQHEPYPLMLPGCSPSCPLERFAELVGPVIPQDWSTECMTTNSHQGTEDSTD

SEQ ID NO: 215 - DNA, 2845 bp, Homo sapiens; identical to SEQ ID NO: 136
  CDS (230)..(1843)

SEQ ID NO: 216 - protein, 538 aa, Homo sapiens; identical to SEQ ID NO: 137

SEQ ID NO: 217 - DNA, 2619 bp, Homo sapiens; identical to SEQ ID NO: 201
  CDS (295)..(2427)

SEQ ID NO: 218 - protein, 711 aa, Homo sapiens; identical to SEQ ID NO: 202

SEQ ID NO: 219 - DNA, 8974 bp, Homo sapiens
  CDS (103)..(8049)
cagctgccacttttcaccgttagaagtagagctttttccagacctcctaccttttagtctactttgaaaggtgaaagaaagaacatcgtttcaggaataaaaatgcacagtagtagttatagttaccgtagcagtgattctgtgtttagtaacactaccagcactcgaaccagtcttgattcaaatgaaaatcttctcttggttcattgtggtccaacactgatcaactcttgcattagcttcggcagtgaatcctttgatggacacaggttagaaatgttgcaacagattgccaacagagttcagagggacagtgtcatctgtgaagacaaactgattcttgctggaaatgctcttcagtctgattctaaaagattagaatcaggagtgcagtttcagaatgaagcagaaattgctgggtatatacttgaatgtgagaaccttttacgccagcatgtaattgatgtacagattcttattgatggaaaatactaccaggcagatcaattggtacagagggttgcaaaactgcgtgacgaaattatggccttaaggaacgaatgttcttctgtgtacagcaaaggacgcatactgacaacagaacagacaaagctcatgatatcaggaatcactcaaagtttaaactcaggatttgcacagaccttacaccctagtctgacctcagggctgacccagagtttaacaccttccctaacctcttctagtatgacttctggcctgtcatcagggatgacttcccgcctgactccatctgtcactccagcttatacacctggtttcccatcaggattagttccaaatttcagttcaggagtagagccaaattcattgcaaactttgaagttgatgcagatccgaaaaccccttctaaagtcttctttgctggatcaaaatttaacagaagaagaaatcaatatgaaatttgttcaggatcttttgaattgggttgatgagatgcaggtacaactggaccgcactgagtggggctcagatttgccaagtgttgaaagccatttagaaaatcataaaaatgttcatagagctattgaagaatttgaatctagtctcaaagaagctaaaatcagtgagattcaaatgacagcacctcttaaactgacttatgcagaaaagttgcacagattagagagtcagtatgcaaaactcttgaatacatccaggaatcaagaacggcaccttgatacactccataattttgtaagtcgtgcgactaatgaacttatttggttgaatgaaaaagaagaggaggaagttgcttatgactggagtgagagaaacaccaacatagctaggaaaaaagattatcatgctgaattaatgagagaacttgatcaaaaggaagaaaatattaaatcagttcaggagatagcagagcagctacttctagaaaatcatccagcccggttaactattgaggcctacagagcggcaatgcagacgcagtggagctggatcttacagctctgccagtgtgtggagcagcacataaaggagaacacagcgtatttcgagtttttcaatgatgccaaagaagctactgattacttaaggaatctaaaagatgccattcagcggaagtacagctgtgatagatcaagcagcattcacaagctagaagaccttgttcaggaatcaatggaagagaaagaagaacttctgcagtacaaaagcactatagcaaacctaatgggaaaagcaaaaacaataattcaactgaagccaaggaattctgactgtccactcaaaacttctattccgatcaaagctatctgtgactacagacaaattgagataaccatttacaaagacgatgaatgtgttttggcgaataactctcatcgtgctaaatggaaggtcattagtcctactgggaatgaggctatggtcccatctgtgtgcttcaccgttcctccaccaaacaaagaagcggtggaccttgccaacagaattgagcaacagtatcagaatgtcctgactctttggcatgagtctcacataaacatgaagagtgtagtatcctggcattatctcatcaatgaaattgatagaattcgagctagcaatgtggcttcaataaagacaatgctacctggtgaacatcagcaagttctaagtaatctacaatctcgttttgaagattttctggaagatagccaggaatcccaagtcttttcaggctcagatataacacaactggaaaaggaggttaatgtatgtaagcagtattatcaagaacttcttaaatctgcagaaagagaggagcaagaggaatcagtttataatctctacatctctgaagttcgaaacattagacttcggttagagaactgtgaagatcggctgattagacagattcgaactcccctggaaagagatgatttgcatgaaagtgtgttcagaatcacagaacaggagaaactaaagaaagagctggaacgacttaaagatgatttgggaacaatcacaaataagtgtgaggagtttttcagtcaagcagcagcctcttcatcagtccctaccctacgatcagagcttaatgtggtccttcagaacatgaaccaagtctattctatgtcttccacttacatagataagttgaaaactgttaacttggtgttaaaaaacactcaagctgcagaagccctcgtaaaactctatgaaactaaactgtgtgaagaagaagcagttatagctgacaagaataatattgagaatctaataagtactttaaagcaatggagatctgaagtagatgaaaagagacaggtattccatgccttagaggatgagttgcagaaagctaaagccatcagtgatgaaatgtttaaaacgtataaagaacgggaccttgattttgactggcacaaagaaaaagcagatcaattagttgaaaggtggcaaaatgttcatgtgcagattgacaacaggttacgggacttagagggcattggcaaatcactgaagtactacagagacacttaccatcctttagatgattggatccagcaggttgaaactactcagagaaagattcaggaaaatcagcctgaaaatagtaaaaccctagccacacagttgaatcaacagaagatgctggtgtccgaaatagaaatgaaacagagcaaaatggacgagtgtcaaaaatatgcagaacagtactcagctacagtgaaggactatgaattacaaacaatgacctaccgggccatggtagattcacaacaaaaatctccagtgaaacgccgaagaatgcagagttcagcagatctcattattcaagagttcatggacctaaggactcgatatactgccctggtcactctcatgacacaatatattaaatttgctggtgattcattgaagaggctggaagaggaggagattaaaaggtgtaaggagacttctgaacatggggcatattcagatctgcttcagcgtcagaaggcaacagtgcttgagaatagcaaacttacaggaaagataagtgagttggaaagaatggtagctgaactaaagaaacaaaagtcccgagtagaggaagaacttccgaaggtcagggaggctgcagaaaatgaattgagaaagcagcagagaaatgtagaagatatctctctgcagaagataagggctgaaagtgaagccaagcagtaccgcagggaacttgaaaccattgtgagagagaaggaagccgctgaaagagaactggagcgggtgaggcagctcaccatagaggccgaggctaaaagagctgccgtggaagagaacctcctgaattttcgcaatcagttggaggaaaacacctttaccagacgaacactggaagatcatcttaaaagaaaagatttaagtctcaatgatttggagcaacaaaaaaataaattaatggaagaattaagaagaaagagagacaatgaggaagaactcttgaagctgataaagcagatggaaaaagaccttgcatttcagaaacaggtagcagagaaacagttgaaagaaaagcagaaaattgaattggaagcaagaagaaaaataactgaaattcagtatacatgtagagaaaatgcattgccagtgtgtccgatcacacaggctacatcatgcagggcagtaacgggtctccagcaagaacatgacaagcagaaagcagaagaactcaaacagcaggtagatgaactaacagctgccaatagaaaggctgaacaagacatgagagagctgacatatgaacttaatgccctccagcttgaaaaaacgtcatctgaggaaaaggctcgtttgctaaaagataaactagatgaaacaaataatacactcagatgccttaagttggagctggaaaggaaggatcaggcggagaaagggtattctcaacaactcagagagcttggtaggcaattgaatcaaaccacaggtaaagctgaagaagccatgcaagaagctagtgatctcaagaaaataaagcgcaattatcagttagaattagaatctcttaatcatgaaaaagggaaactacaaagagaagtagacagaatcacaagggcacatgctgtagctgagaagaatattcagcatttaaattcacaaattcattcttttcgagatgagaaagaattagaaagactacaaatctgccagagaaaatcagatcatctaaaagaacaatttgagaaaagccatgagcagttgcttcaaaatatcaaagctgaaaaagaaaataatgataaaatccaaaggctcaatgaagaattggagaaaagtaatgagtgtgcagagatgctaaaacaaaaagtagaggagcttactaggcagaataatgaaaccaaattaatgatgcagagaattcaggcagaatcagagaatatagttttagagaaacaaactatccagcaaagatgtgaagcactgaaaattcaggcagatggttttaaagatcagctacgcagcacaaatgaacacttgcataaacagacaaaaacagagcaggattttcaaagaaaaattaaatgcctagaagaagacctggcgaaaagtcaaaatttggtaagtgaatttaagcaaaagtgtgaccaacagaacattatcatccagaataccaagaaagaagttagaaatctgaatgcggaactgaatgcttccaaagaagagaagcgacgcggggagcagaaagttcagctacaacaagctcaggtgcaagagttaaataacaggttgaaaaaagtacaagacgaattacacttaaagaccatagaggagcagatgacccacagaaagatggttctgtttcaggaagaatctggtaaattcaaacaatcagcagaggagtttcggaagaagatggaaaaattaatggagtccaaagtcatcactgaaaatgatatttcaggcattaggcttgactttgtgtctcttcaacaagaaaactctagagcccaagaaaatgctaagctttgtgaaacaaacattaaagaacttgaaagacagcttcaacagtatcgtgaacaaatgcagcaagggcagcacatggaagcaaatcattaccaaaaatgtcagaaacttgaggatgagctgatagcccagaagcgtgaggttgaaaacctgaagcaaaaaatggaccaacagatcaaagagcatgaacatcaattagttttgctccagtgtgaaattcaaaaaaagagcacagccaaagactgtaccttcaaaccagattttgagatgacagtgaaggagtgccagcactctggagagctgtcctctagaaacactggacaccttcacccaacacccagatcccctctgttgagatggactcaagaaccacagccattggaagagaagtggcagcatcgggttgttgaacagatacccaaagaagtccaattccagccaccaggggctccactcgagaaagagaaaagccagcagtgttactctgagtacttttctcagacaagcaccgagttacagataacttttgatgagacaaaccccattacaagactgtctgaaattgagaagataagagaccaagccctgaacaattctagaccacctgttaggtatcaagataacgcatgtgaaatggaactggtgaaggttttgacacccttagagatagctaagaacaagcagtatgatatgcatacagaagtcacaacattaaaacaagaaaagaacccagttcccagtgctgaagaatggatgcttgaagggtgcagagcatctggtggactcaagaaaggggatttccttaagaagggcttagaaccagagaccttccagaactttgatggtgatcatgcatgttcagtcagggatgatgaatttaaattccaagggcttaggcacactgtgactgccaggcagttggtggaagctaagcttctggacatgagaacaattgagcagctgcgactcggtcttaagactgttgaagaagttcagaaaactcttaacaagtttctgacgaaagccacctcaattgcagggctttacctagaatctacaaaagaaaagatttcatttgcctcagcggccgagagaatcataatagacaaaatggtggctttggcatttttagaagctcaggctgcaacaggttttataattgatcccatttcaggtcagacatattctgttgaagatgcagttcttaaaggagttgttgaccccgaattcagaattaggcttcttgaggcagagaaggcagctgtgggatattcttattcttctaagacattgtcagtgtttcaagctatggaaaatagaatgcttgacagacaaaaaggtaaacatatcttggaagcccagattgccagtgggggtgtcattgaccctgtgagaggcattcgtgttcctccagaaattgctctgcagcaggggttgttgaataatgccatcttacagtttttacatgagccatccagcaacacaagagttttccctaatcccaataacaagcaagctctgtattactcagaattactgcgaatgtgtgtatttgatgtagagtcccaatgctttctgtttccatttggggagaggaacatttccaatctcaatgtcaagaaaacacatagaatttctgtagtagatactaaaacaggatcagaattgaccgtgtatgaggctttccagagaaacctgattgagaaaagtatatatcttgaactttcagggcagcaatatcagtggaaggaagctatgttttttgaatcctatgggcattcttctcatatgctgactgatactaaaacaggattacacttcaatattaatgaggctatagagcagggaacaattgacaaagccttggtcaaaaagtatcaggaaggcctcatcacacttacagaacttgctgattctttgctgagccggttagtccccaagaaagatttgcacagtcctgttgcagggtattggctgactgctagtggggaaaggatctctgtactaaaagcctcccgtagaaatttggttgatcggattactgccctccgatgccttgaagcccaagtcagtacagggggcataattgatcctcttactggcaaaaagtaccgggtggccgaagctttgcatagaggcctggttgatgaggggtttgcccagcagctgcgacagtgtgaattagtaatcacagggattggccatcccatcactaacaaaatgatgtcagtggtggaagctgtgaatgcaaatattataaataaggaaatgggaatccgatgtttggaatttcagtacttgacaggagggttgatagagccacaggttcactctcggttatcaatagaagaggctctccaagtaggtattatagatgtcctcattgccacaaaactcaaagatcaaaagtcatatgtcagaaatataatatgccctcagacaaaaagaaagttgacatataaagaagccttagaaaaagctgattttgatttccacacaggacttaaactgttagaagtatctgagcccctgatgacaggaatttctagcctctactattcttcctaatgggacatgtttaaataactgtgcaaggggtgatgcaggctggttcatgccactttttcagagtatgatgatatcggctacatatgcagtctgtgaattatgtaacatactctatttcttgagggctgcaaattgctaagtgctcaaaatagagtaagttttaaattgaaaattacataagatttaatgcccttcaaatggtttcatttagccttgagaatggttttttgaaacttggccacactaaaatgtttttttttttacgtagaatgtgggataaacttgatgaactccaagttcacagtgtcatttcttcagaactccccttcattgaatagtgatcatttattaaatgataaattgcactcgctgaaagagcacgtcatgaagcaccatggaatcaaagagaaagatataaattcgttcccacagccttcaagctgcagtgttttagattgcttcaaaaaatgaaaaagttttgcctttttctgtatatagtgaccttctttgcatattaaaatgtttaccacaatgtcccatttctagttaagtcttcgcacttgaaagctaacattatgaatattatgtgttggaggaggggaaggattttcttcattctgtgtattttccggttacatgtacagtagacgttctctattctatcagccttctatggtacctttttgtcaggacaattaggattgtaatgctaatgcaaaggcagcaattcaaagatcttctagtgcctcatgaataaagttgagatttaaaatttgtaacattgatggaacagctgggaggttagaccaatcattaaggaatgtatgccatagctttctttgctaccataaacattttggaggtgcatctgctatgtgacatggtaaatatggttaagtgaatgaataaaatgttttagtaa

SEQ ID NO: 220 - protein, 2649 aa, Homo sapiens
MHSSSYSYRSSDSVFSNTTSTRTSLDSNENLLLVHCGPTLINSCISFGSESFDGHRLEMLQQIANRVQRDSVICEDKLILAGNALQSDSKRLESGVQFQNEAEIAGYILECENLLRQHVIDVQILIDGKYYQADQLVQRVAKLRDEIMALRNECSSVYSKGRILTTEQTKLMISGITQSLNSGFAQTLHPSLTSGLTQSLTPSLTSSSMTSGLSSGMTSRLTPSVTPAYTPGFPSGLVPNFSSGVEPNSLQTLKLMQIRKPLLKSSLLDQNLTEEEINMKFVQDLLNWVDEMQVQLDRTEWGSDLPSVESHLENHKNVHRAIEEFESSLKEAKISEIQMTAPLKLTYAEKLHRLESQYAKLLNTSRNQERHLDTLHNFVSRATNELIWLNEKEEEEVAYDWSERNTNIARKKDYHAELMRELDQKEENIKSVQEIAEQLLLENHPARLTIEAYRAAMQTQWSWILQLCQCVEQHIKENTAYFEFFNDAKEATDYLRNLKDAIQRKYSCDRSSSIHKLEDLVQESMEEKEELLQYKSTIANLMGKAKTIIQLKPRNSDCPLKTSIPIKAICDYRQIEITIYKDDECVLANNSHRAKWKVISPTGNEAMVPSVCFTVPPPNKEAVDLANRIEQQYQNVLTLWHESHINMKSVVSWHYLINEIDRIRASNVASIKTMLPGEHQQVLSNLQSRFEDFLEDSQESQVFSGSDITQLEKEVNVCKQYYQELLKSAEREEQEESVYNLYISEVRNIRLRLENCEDRLIRQIRTPLERDDLHESVFRITEQEKLKKELERLKDDLGTITNKCEEFFSQAAASSSVPTLRSELNVVLQNMNQVYSMSSTYIDKLKTVNLVLKNTQAAEALVKLYETKLCEEEAVIADKNNIENLISTLKQWRSEVDEKRQVFHALEDELQKAKAISDEMFKTYKERDLDFDWHKEKADQLVERWQNVHVQIDNRLRDLEGIGKSLKYYRDTYHPLDDWIQQVETTQRKIQENQPENSKTLATQLNQQKMLVSEIEMKQSKMDECQKYAEQYSATVKDYELQTMTYRAMVDSQQKSPVKRRRMQSSADLIIQEFMDLRTRYTALVTLMTQYIKFAGDSLKRLEEEEIKRCKETSEHGAYSDLLQRQKATVLENSKLTGKISELERMVAELKKQKSRVEEELPKVREAAENELRKQQRNVEDISLQKIRAESEAKQYRRELETIVREKEAAERELERVRQLTIEAEAKRAAVEENLLNFRNQLEENTFTRRTLEDHLKRKDLSLNDLEQQKNKLMEELRRKRDNEEELLKLIKQMEKDLAFQKQVAEKQLKEKQKIELEARRKITEIQYTCRENALPVCPITQATSCRAVTGLQQEHDKQKAEELKQQVDELTAANRKAEQDMRELTYELNALQLEKTSSEEKARLLKDKLDETNNTLRCLKLELERKDQAEKGYSQQLRELGRQLNQTTGKAEEAMQEASDLKKIKRNYQLELESLNHEKGKLQREVDRITRAHAVAEKNIQHLNSQIHSFRDEKELERLQICQRKSDHLKEQFEKSHEQLLQNIKAEKENNDKIQRLNEELEKSNECAEMLKQKVEELTRQNNETKLMMQRIQAESENIVLEKQTIQQRCEALKIQADGFKDQLRSTNEHLHKQTKTEQDFQRKIKCLEEDLAKSQNLVSEFKQKCDQQNIIIQNTKKEVRNLNAELNASKEEKRRGEQKVQLQQAQVQELNNRLKKVQDELHLKTIEEQMTHRKMVLFQEESGKFKQSAEEFRKKMEKLMESKVITENDISGIRLDFVSLQQENSRAQENAKLCETNIKELERQLQQYREQMQQGQHMEANHYQKCQKLEDELIAQKREVENLKQKMDQQIKEHEHQLVLLQCEIQKKSTAKDCTFKPDFEMTVKECQHSGELSSRNTGHLHPTPRSPLLRWTQEPQPLEEKWQHRVVEQIPKEVQFQPPGAPLEKEKSQQCYSEYFSQTSTELQITFDETNPITRLSEIEKIRDQALNNSRPPVRYQDNACEMELVKVLTPLEIAKNKQYDMHTEVTTLKQEKNPVPSAEEWMLEGCRASGGLKKGDFLKKGLEPETFQNFDGDHACSVRDDEFKFQGLRHTVTARQLVEAKLLDMRTIEQLRLGLKTVEEVQKTLNKFLTKATSIAGLYLESTKEKISFASAAERIIIDKMVALAFLEAQAATGFIIDPISGQTYSVEDAVLKGVVDPEFRIRLLEAEKAAVGYSYSSKTLSVFQAMENRMLDRQKGKHILEAQIASGGVIDPVRGIRVPPEIALQQGLLNNAILQFLHEPSSNTRVFPNPNNKQALYYSELLRMCVFDVESQCFLFPFGERNISNLNVKKTHRISVVDTKTGSELTVYEAFQRNLIEKSIYLELSGQQYQWKEAMFFESYGHSSHMLTDTKTGLHFNINEAIEQGTIDKALVKKYQEGLITLTELADSLLSRLVPKKDLHSPVAGYWLTASGERISVLKASRRNLVDRITALRCLEAQVSTGGIIDPLTGKKYRVAEALHRGLVDEGFAQQLRQCELVITGIGHPITNKMMSVVEAVNANIINKEMGIRCLEFQYLTGGLIEPQVHSRLSIEEALQVGIIDVLIATKLKDQKSYVRNIICPQTKRKLTYKEALEKADFDFHTGLKLLEVSEPLMTGISSLYYSS

SEQ ID NO: 221 - DNA, 7006 bp, Homo sapiens
  CDS (363)..(6836)
gtttgtcgcagcaagaacaaacagcattccttccagcaaatcaagtgcctgttttacaacagaacacttcagttgctgcaaaacaaccccagacttctgtggtacagaatcaacaacagatatcacaacagggacctatatatgatgaagtggaattggatgcattggctgaaattgagcgaatagagagagaatcagctattgaaagggagcgcttctcaaaagaagttcaagataaagataagcctttgaaaaaaagaaaacaagattcttacccacaggaggctgggggtgctacaggaggtaatagaccagcttctcaggagacgggttctacgggaaatgggtcaaggccagcattaatggttagcattgatcttcatcaggcaggaagagtggactctcaggcttctataactcaggattcagactccataaaaaagcctgaagaaatcaaacaatgtaatgatgcacctgtttctgttcttcaggaagatattgttggaagtcttaaatctacaccagaaaaccatcctgagacacctaaaaaaaagtctgatcctgagctttcaaagagtgaaatgaaacaaagtgaaagtagattagcagaatctaaaccaaatgaaaaccgattggtggagacaaaatcaagtgaaaataagttagaaactaaagttgagacccaaacagaagaacttaaacagaatgagagcagaacaactgaatgcaaacaaaacgagagcaccatagttgagcctaaacaaaatgaaaatagactgtctgacacaaaaccaaatgacaacaaacaaaataatggcagatcagaaacaacaaaatcaaggcctgaaaccccaaagcaaaagggtgaaagccggcctgagactccaaaacaaaagagtgatgggcatcctgaaaccccaaaacagaagggtgatggaaggcctgaaactccaaagcaaaaaggtgagagccgccctgaaactccaaagcaaaaaaatgaagggcgacctgaaacaccaaaacacaggcatgacaataggagggattctggaaagccatctacagagaaaaaacctgaagtgtctaaacataaacaagatactaaatctgactcacctcggttaaaatcagaacgagctgaagccttaaagcagagacctgatgggcgatctgtttctgagtcactaagacgtgaccatgataataaacaaaaatcagatgacaggggtgaatcagagcgacatcgaggggatcagtctagggttcgaagaccagaaacattgagatcctctagtagaaatgaacatggcattaaatctgatagttcaaaaactgataaactagaacgaaaacacaggcatgaatcaggggactcaagggaaagaccatcttctggggaacaaaaatcaagacctgacagtcctcgtgttaaacaaggagattctaataaatcaagatctgataaacttggttttaaatcaccaactagtaaagatgacaaaaggacagagggtaacaagagtaaagtagacactaataaagcacaccctgacaataaggcagaatttccaagttatttgttggggggcaggtctggtgcgttgaaaaattttgtcattccgaaaatcaagagggataaagatggcaatgttactcaggagacaaagaaaatggaaatgaaaggagagccgaaagacaaagtagaaaaaataggattagttgaagatctaaataaaggagctaagcctgtagttgtgctacaaaaactgtctttggatgatgttcagaaacttattaaagatagagaggacaaatcaagaagttcccttaaacctatcaagaataaaccatcaaagtcaaataaaggtagtatagatcaatcagtgttaaaagaattaccccctgaactcctggcagaaattgagtccaccatgccactttgtgaacgtgtgaaaatgaacaaacgcaagcgtagcacagttaatgaaaagccaaaatatgctgaaatcagttcagatgaagataatgatagtgatgaagcttttgaatcctctaggaaacgacataaaaaagatgatgataaagcttgggaatatgaagagcgtgacagaagaagctctggggatcataggagaagtggccactctcatgaaggaagaaggagttcaggtggtggtcgttatcgaaaccgaagtccgtcagattctgacatggaagattattctcctcctcccagccttagtgaggttgctaggaaaatgaagaaaaaagaaaaacagaagaaaaggaaagcatatgaaccaaaactaacacctgaagaaatgatggactcttcaacttttaagagattcacagcctcaatagagaatattttggataatttggaagatatggattttactgcgtttggtgatgatgatgaaattcctcaggaactgctcttaggaaaacatcagcttaatgaacttggcagtgaatctgctaaaataaaagcaatgggtataatggataagctttcaactgacaaaactgtgaaagtcttaaatatcttggagaagaatattcaggatgggtcaaagctttccactttgttaaatcataataacgatactgaagaagaagaaaggttatggagagaccttattatggagagagttacaaaatcagcggatgcttgtcttacaactatcaacattatgacatcccctaacatgccaaaagctgtgtacattgaggatgtaattgaaagagttatacagtacactaaatttcatttgcagaatacactttatcctcagtatgatcctgtttacagattagatcctcatggaggaggcttattaagttcaaaagcaaaacgggctaaatgttctacccataagcagagagtaatagtaatgctttataacaaagtttgtgacattgttagcagcttatcagaattgctagagatacaacttcttacagacacaacaattcttcaggtttcatctatgggaataacaccattttttgtggaaaatgtcagtgaactacagttgtgtgccattaagttagtcactgcagtattctcaagatatgaaaaacataggcagttaattttggaagaaatttttacttcacttgcaagattaccaaccagcaagaggagtttaaggaacttcaggttaaacagtagtgatatggatggagaacctatgtatattcagatggttacagcactggttttacaacttattcagtgtgtggtacacttaccatcatcagagaaggactctaatgcagaagaagattcaaataaaaaaattgaccaggatgttgtcattactaactcttatgaaacagctatgcgaacagcccaaaacttcctctccatcttccttaaaaaatgtggtagtaagcaaggtgaagaagattacagaccactgtttgaaaattttgttcaagaccttctttcaacagtcaataagcctgaatggccagctgctgaactactccttagtttgttagggagactgttggttcatcagttcagtaacaagtcaacagagatggctttaagagtggcatctcttgattaccttggaactgttgctgcacggctaagaaaagatgctgttacaagcaaaatggatcaaggatctatagaacgcattttaaaacaggtttcaggaggggaagatgaaatccaacaattacaaaaagcattgcttgattacttggatgaaaacactgagactgatccttcactagtgttttctcgtaaattctatatagcccagtggtttcgagacacaactctggaaacagaaaaagcaatgaaatcacaaaaagatgaagaatcatctgaaggaacacatcatgcaaaggaaattgagacaactggccaaattatgcatcgagctgaaaaccgaaaaaagtttcttagaagcattatcaaaaccacaccttctcagtttagcacattaaagatgaactctgatactgtggactatgatgatgcttgcttgattgttcgatacttggcctccatgaggccgtttgcccagagctttgatatttatttgacacagatcctacgagttcttggtgaaaatgcaattgctgttcgaacaaaagccatgaagtgtttgtctgaggttgttgctgtagaccccagtattctagcaaggcttgatatgcaacgaggtgttcatggacgattgatggataattcgactagtgtccgagaagcagcagtagaattactaggtcgatttgtcctttgtcgacctcagcttgctgaacagtattatgatatgctgattgaaagaatattggatactggtatcagtgtcaggaaaagagtaataaagattctcagagacatttgtattgaacaaccaacatttccaaaaatcacagaaatgtgtgtaaaaatgattcgcagagtcaatgatgaagagggcattaagaaattagtaaatgaaacattccagaaactctggtttactccaactccacacaatgacaaagaagcaatgacaaggaaaattttaaacattaccgatgtggttgcagcatgcagagatactggatatgactggtttgagcaactgcttcaaaacttgttgaagtccgaagaggattcctcatataaacctgtgaagaaagcttgtactcaacttgttgataacctagttgagcacattcttaaatatgaggaatctctagctgactctgacaataaaggtgtgaattctggaagattggtagcttgcataaccactttgttcttattcagcaaaataagaccccagctcatggttaaacatgcaatgactatgcaaccataccttaccactaaatgtagtacgcaaaatgatttcatggttatctgcaatgttgcaaaaatcctagagctagttgtaccactgatggagcatccaagtgaaacttttcttgccactattgaggaagatctaatgaagctcatcatcaaatatggcatgactgtagtgcaacattgtgtgagctgtcttggagctgttgtaaataaagtgacacaaaattttaaatttgtgtgggcttgtttcaatagatactatggtgccatttcaaaattaaaaagtcaacaccaagaggacccaaataacacttcacttctaacaaacaaaccagcacttcttagatcccttttcaccgttggagcactatgtcggcattttgattttgatctggaagattttaaaggcaacagcaaggttaacataaaagataaagtacttgaactattgatgtattttacaaaacactcagatgaagaagtacaaacaaaagctatcattggtctaggatttgcctttattcagcatccaagtctaatgttcgagcaagaagtgaagaatctatataataatattttatctgataagaactcctcagtcaatttaaaaatacaagtgttaaaaaacctccagacctacctacaagaagaagatacacgtatgcagcaggcagatagagactggaagaaagttgcaaaacaggaagacttaaaagaaatgggtgatgtttcctcagggatgagtagttccatcatgcagctttatctcaaacaggtgcttgaggcattttttcacacccagtcaagtgtacgccactttgccctaaatgtcattgcattgactctaaatcaaggtcttattcatccagttcagtgtgtgccatatttaattgctatgggcacagacccagaacctgctatgcggaacaaggctgatcagcaacttgtggaaatagacaaaaaatatgctggattcattcatatgaaagcagtggctggtatgaagatgtcttaccaggtacaacaggcaatcaacacatgcctaaaagatcctgtaaggggtttcagacaagacgagtcctctagcgctttgtgttcacacctttactccatgatccgtggaaaccgccaacacagacgagcctttcttatttctttactcaacctctttgatgacacagcaaaaacagacgtgactatgctcttgtatatagcagacaatctagcctgttttccataccagacacaggaagagccgttgtttataatgcatcatatagacattacactctcagtttctggtagtaacctactgcagtcattcaaggagtctatggtaaaggacaaaaggaaagagagaaaatcatcacctagtaaggaaaatgagtcaagcgacagtgaagaagaagtttccaggcctcggaagtcacggaaacgtgtagattcagattcagattcagattcagaagacgatataaattcagtgatgaaatgtttgccagaaaattcagctcctttaatcgaatttgcaaatgtgtcccagggtattttattacttctcatgttaaaacaacatttgaagaatctttgtggattttctgatagtaaaattcagaagtactctccatctgaatctgcaaaagtatatgataaagcgataaaccgaaaaacaggagttcattttcatccaaaacaaacactggacttcctgcggagtgacatggctaattccaaaatcacagaagaggtgaaaaggagtatagtaaaacagtatctagatttcaaacttctcatggaacatctggaccctgatgaagaagaagaagaaggggaggtttcagctagcacaaatgctcggaacaaagcaattacctcactgcttggaggaggcagccctaaaaataatacagcagcagagacagaagatgatgaaagtgatggggaggatagaggaggaggcacttcaggggtgaggcggaggaggagtcaacgtatttcgcagcgtattacgtaaaatgatttttatgtgcttatatatgtcagtctattaaatgtacaccaagtaatgtaatacttaaaagagaaaacattttgtagatagagattctctacttacccgtttatacatccttttgtagaaagtttaacataaaagacaataaaaaaacagaaatgagattt

SEQ ID NO: 222 - protein, 2158 aa, Homo sapiens
MVSIDLHQAGRVDSQASITQDSDSIKKPEEIKQCNDAPVSVLQEDIVGSLKSTPENHPETPKKKSDPELSKSEMKQSESRLAESKPNENRLVETKSSENKLETKVETQTEELKQNESRTTECKQNESTIVEPKQNENRLSDTKPNDNKQNNGRSETTKSRPETPKQKGESRPETPKQKSDGHPETPKQKGDGRPETPKQKGESRPETPKQKNEGRPETPKHRHDNRRDSGKPSTEKKPEVSKHKQDTKSDSPRLKSERAEALKQRPDGRSVSESLRRDHDNKQKSDDRGESERHRGDQSRVRRPETLRSSSRNEHGIKSDSSKTDKLERKHRHESGDSRERPSSGEQKSRPDSPRVKQGDSNKSRSDKLGFKSPTSKDDKRTEGNKSKVDTNKAHPDNKAEFPSYLLGGRSGALKNFVIPKIKRDKDGNVTQETKKMEMKGEPKDKVEKIGLVEDLNKGAKPVVVLQKLSLDDVQKLIKDREDKSRSSLKPIKNKPSKSNKGSIDQSVLKELPPELLAEIESTMPLCERVKMNKRKRSTVNEKPKYAEISSDEDNDSDEAFESSRKRHKKDDDKAWEYEERDRRSSGDHRRSGHSHEGRRSSGGGRYRNRSPSDSDMEDYSPPPSLSEVARKMKKKEKQKKRKAYEPKLTPEEMMDSSTFKRFTASIENILDNLEDMDFTAFGDDDEIPQELLLGKHQLNELGSESAKIKAMGIMDKLSTDKTVKVLNILEKNIQDGSKLSTLLNHNNDTEEEERLWRDLIMERVTKSADACLTTINIMTSPNMPKAVYIEDVIERVIQYTKFHLQNTLYPQYDPVYRLDPHGGGLLSSKAKRAKCSTHKQRVIVMLYNKVCDIVSSLSELLEIQLLTDTTILQVSSMGITPFFVENVSELQLCAIKLVTAVFSRYEKHRQLILEEIFTSLARLPTSKRSLRNFRLNSSDMDGEPMYIQMVTALVLQLIQCVVHLPSSEKDSNAEEDSNKKIDQDVVITNSYETAMRTAQNFLSIFLKKCGSKQGEEDYRPLFENFVQDLLSTVNKPEWPAAELLLSLLGRLLVHQFSNKSTEMALRVASLDYLGTVAARLRKDAVTSKMDQGSIERILKQVSGGEDEIQQLQKALLDYLDENTETDPSLVFSRKFYIAQWFRDTTLETEKAMKSQKDEESSEGTHHAKEIETTGQIMHRAENRKKFLRSIIKTTPSQFSTLKMNSDTVDYDDACLIVRYLASMRPFAQSFDIYLTQILRVLGENAIAVRTKAMKCLSEVVAVDPSILARLDMQRGVHGRLMDNSTSVREAAVELLGRFVLCRPQLAEQYYDMLIERILDTGISVRKRVIKILRDICIEQPTFPKITEMCVKMIRRVNDEEGIKKLVNETFQKLWFTPTPHNDKEAMTRKILNITDVVAACRDTGYDWFEQLLQNLLKSEEDSSYKPVKKACTQLVDNLVEHILKYEESLADSDNKGVNSGRLVACITTLFLFSKIRPQLMVKHAMTMQPYLTTKCSTQNDFMVICNVAKILELVVPLMEHPSETFLATIEEDLMKLIIKYGMTVVQHCVSCLGAVVNKVTQNFKFVWACFNRYYGAISKLKSQHQEDPNNTSLLTNKPALLRSLFTVGALCRHFDFDLEDFKGNSKVNIKDKVLELLMYFTKHSDEEVQTKAIIGLGFAFIQHPSLMFEQEVKNLYNNILSDKNSSVNLKIQVLKNLQTYLQEEDTRMQQADRDWKKVAKQEDLKEMGDVSSGMSSSIMQLYLKQVLEAFFHTQSSVRHFALNVIALTLNQGLIHPVQCVPYLIAMGTDPEPAMRNKADQQLVEIDKKYAGFIHMKAVAGMKMSYQVQQAINTCLKDPVRGFRQDESSSALCSHLYSMIRGNRQHRRAFLISLLNLFDDTAKTDVTMLLYIADNLACFPYQTQEEPLFIMHHIDITLSVSGSNLLQSFKESMVKDKRKERKSSPSKENESSDSEEEVSRPRKSRKRVDSDSDSDSEDDINSVMKCLPENSAPLIEFANVSQGILLLLMLKQHLKNLCGFSDSKIQKYSPSESAKVYDKAINRKTGVHFHPKQTLDFLRSDMANSKITEEVKRSIVKQYLDFKLLMEHLDPDEEEEEGEVSASTNARNKAITSLLGGGSPKNNTAAETEDDESDGEDRGGGTSGVRRRRSQRISQRIT

SEQ ID NO: 223 - DNA, 1909 bp, Homo sapiens
  CDS (69)..(317)
gacaccttttaaaatgcagaactaactgaggcatttcagtaactttgctttcaaatcaataaagtcaaatgtatggaaacattttgtgccctactctccataccctgtgtactcaaattctctactgtatgaattatgctttaagtagaattcagtgccaaggagaacttggtgaaataaattattttaattttttttttatcctttacaaagccatggattttatttggttgatgtgtgctctgtacacaagccatttcaataggatggagctgttaattattttccaaagagtaatagacatgcaaaagtttcaataaaaactgggccattaacaaataaattaataaactaataagcattcccttctaggtttttgccaaactgcctatccaataacaaatttgagaatcgttgaaaaagctagttatatttcagagaaatgattttcattattgaaactgttctccctagcaggccattttccctttttcctgggagtttagcaagtttaggagagaatagtcatgaaaagaaagggaagaaaggggagaagggaagaggttaaaaagtaagtgctcagacctatgaacgtaatccctttgctagaaatatttaagagcagctcagcttggttgaaactgagttttgtcatcttccatatttgcaggaaggtattttctgacttgcaatgcagctagatgtaaaattttattttatcatcctagaaagccttgactagaaaaatgaataaatattgagggtttcctgtccatatctggcttgcatgtgccagaaagcagagaatagaaaatgtaatctccaacatccaagcatcgaaacccaaggggtaggcaattctatgtaggttttggacatgaagtttggtgcatcttggtttatgctggctcaactgctattaaacctctctggcttatagtctcttcattctattagacaagcacgtatcgaacacttgcttcgcacaaggctctttagttaacaatttagcagctactgtttgtgttaaacacacttttcaccaaataggttctgaggcaaacgagagcaatgactatttaaagaaaggctttcccagcatcacttacacatcccaaaactaaaaagatcaactcttccaactgagaaaagactcctggctttgaatggaaacttacagcagagagtcacaggccacggcaacaacaacgacaacaacaaacatttggaatattattctcaactcacgttttaataatacatcttaattatttttctagtagagaaactacaaatcagcctcttcaacatttatatacagtttaataagcctcttgcaagttacttgttctctcacctgaggtatttttttcctccccaccttgcccctgttcctcccttcctcttctccctttgcaagaggaaatatttaacatatttgggtccaacttcaataatgtaataattaatacattaaaagcatttaacttcctttctagaaaaatgcacaggctaaggcatagacaaaacaaagagaaatgctgagaaatttgccactggagacaagcaatctgaataaatatttgccaaaagttctttttatgtcatatagtgtcaggatttgaaggagctattttttttaatgttgcaactagcaactcatcttcggaagacacagccaggagaatgaagtagaagtgaaaggtttataaatccatttgtaagcatttatcccatatattttaaattcaagaaaaattgtgtttatctttagaattttgtattcaatactttatgtactatgtgactcatgcttctggataaataaagcaccaaatatgtatctgtaaccacaatcacacatattatattaaatatatatctatataacaaaaaaaaaaaaaaaaaa

SEQ ID NO: 224 - protein, 83 aa, Homo sapiens
MYGNILCPTLHTLCTQILYCMNYALSRIQCQGELGEINYFNFFFILYKAMDFIWLMCALYTSHFNRMELLIIFQRVIDMQKFQ

SEQ ID NO: 225 - DNA, 2725 bp, Homo sapiens; identical to SEQ ID NO: 195
  CDS (169)..(1335)

SEQ ID NO: 226 - protein, 389 aa, Homo sapiens; identical to SEQ ID NO: 196

SEQ ID NO: 227 - DNA, 765 bp, Homo sapiens
  CDS (133)..(399)
gaattcccccatgacccctaacagggccctctcagccctcctaatgacctccggcctagccatgtgatttcacttccactccataacgctcctcatactaggcctactaaccaacacactaaccatataccaatgatggcgcgatgtaacacgagaaagcacataccaaggccaccacacaccacctgtccaaaaaggccttcgatacgggataatcctatttattacctcagaagtttttttcttcgcaggatttttctgagccttttaccactccagcctagcccctaccccccaattaggagggcactggccccaacaggcatcaccccgctaaatcccctagaagtcccactcctaaacacatccgtattactcgcatcaggagtatcaatcacctgagctcaccatagtctaatagaaaacaaccgaaaccaaataattcaagcactgcttattacaattttactgggtctctattttaccctcctacaagcctcagagtacttcgagtctcccttcaccatttccgacggcatctacggctcaacattttttgtagccacaggcttccacggacttcacgtcattattggctcaactttcctcactatctgcttcatccgccaactaatatttcactttacatccaaacatcactttggcttcgaagccgccgcctgatactggcattttgtagatgtggtttgactatttctgtatgtctccatctattgatgagggtcttactcttttttggaattc

SEQ ID NO: 228 - protein, 89 aa, Homo sapiens
MMARCNTRKHIPRPPHTTCPKRPSIRDNPIYYLRSFFLRRIFLSLLPLQPSPYPPIRRALAPTGITPLNPLEVPLLNTSVLLASGVSIT

SEQ ID NO: 229 - DNA, 8974 bp, Homo sapiens; identical to SEQ ID NO: 219
  CDS (103)..(8049)

SEQ ID NO: 230 - protein, 2649 aa, Homo sapiens; identical to SEQ ID NO: 220

SEQ ID NO: 231 - DNA, 2019 bp, Homo sapiens
  CDS (22)..(1689)
acgtgtatcgctgccgtcaagatggaggggcctttgtccgtgttcggtgaccgcagcactggggaaacgatccgctcccaaaacgttatggctgcagcttcgattgccaatattgtaaaaagttctcttggtccagttggcttggataaaatgttggtggatgatattggtgatgtaaccattactaacgatggtgcaaccatcctgaagttactggaggtagaacatcctgcagctaaagttctttgtgagctggctgatctgcaagacaaagaagttggagatggaactacttcagtggttattattgcagcagaactcctaaaaaatgcagatgaattagtcaaacagaaaattcatcccacatcagttattagtggctatcgacttgcttgcaaggaagcagtgcgttatatcaatgaaaacctaattgttaacacagatgaactgggaagagattgcctgattaatgctgctaagacatccatgtcttccaaaatcattgggataaatggtgatttctttgctaacatggtagtagatgctgtacttgctattaaatacacagacataagaggccagccacgctatccagtcaactctgttaatattttgaaagcccatgggagaagtcaaatggagagtatgctcatcagtggctatgcactcaactgtgtggtgggatcccagggcatgcccaagagaatcgtaaatgcaaaaattgcttgccttgacttcagcctgcaaaaaacaaaaatgaagcttggtgtacaggtggtcattacagaccctgaaaaactggaccaaattagacagagagaatcagatatcaccaaggagagaattcagaagatcctggcaactggtgccaatgttattctaaccactggtggaattgatgatatgtgtctgaagtattttgtggaggctggtgctatggcagttagaagagttttaaaaagggaccttaaacgcattgccaaagcttctggagcaactattctgtcaaccctggccaatttggaaggtgaagaaacttttgaagctgcaatgttgggacaggcagaagaagtggtacaggagagaatttgtgatgatgagctgatcttaatcaaaaatactaaggctcgtacgtctgcatcgattatcttacgtggggcaaatgatttcatgtgtgatgagatggagcgctctttacatgatgcactttgtgtagtgaagagagttttggagtcaaaatctgtggttcccggtgggggtgctgtagaagcagccctttccatataccttgaaaactatgcaaccagcatggggtctcgggaacagcttgcgattgcagagtttgcaagatcacttcttgttattcccaatacactagcagttaatgctgcccaggactccacagatctggttgcaaaattaagagcttttcataatgaggcccaggttaacccagaacgtaaaaatctaaaatggattggtcttgatttgagcaatggtaaacctcgagacaacaaacaagcaggggtgtttgaaccaaccatagttaaagttaagagtttgaaatttgcaacagaagctgcaatcaccattcttcgaattgatgatcttattaaattacatccagaaatccttcggattaaacatggaagttatgaagatgctgttcactctggagcccttaatgattgatctgatgttccttttatttataacaatgttaaatgcaatgtcttgtaccttgagttgagtattacacattaaagtaaagtacaagctgtaaacttgggtttttgtgatgtaggaaatggtttccatctgtactttggtcctctgatttcagatattgcaacctagtactttattagtttaaaaagaaattgaggttgttcaaagtttaagcaattcattctctctgaacacacattgctattcccatcccacccccaatgcacagggctgcaacaccacgacttctgcccattctctccagtgtgtgtaacagggtcacaagaattc

SEQ ID NO: 232 - protein, 556 aa, Homo sapiens
MEGPLSVFGDRSTGETIRSQNVMAAASIANIVKSSLGPVGLDKMLVDDIGDVTITNDGATILKLLEVEHPAAKVLCELADLQDKEVGDGTTSVVIIAAELLKNADELVKQKIHPTSVISGYRLACKEAVRYINENLIVNTDELGRDCLINAAKTSMSSKIIGINGDFFANMVVDAVLAIKYTDIRGQPRYPVNSVNILKAHGRSQMESMLISGYALNCVVGSQGMPKRIVNAKIACLDFSLQKTKMKLGVQVVITDPEKLDQIRQRESDITKERIQKILATGANVILTTGGIDDMCLKYFVEAGAMAVRRVLKRDLKRIAKASGATILSTLANLEGEETFEAAMLGQAEEVVQERICDDELILIKNTKARTSASIILRGANDFMCDEMERSLHDALCVVKRVLESKSVVPGGGAVEAALSIYLENYATSMGSREQLAIAEFARSLLVIPNTLAVNAAQDSTDLVAKLRAFHNEAQVNPERKNLKWIGLDLSNGKPRDNKQAGVFEPTIVKVKSLKFATEAAITILRIDDLIKLHPEILRIKHGSYEDAVHSGALND

SEQ ID NO: 233 - DNA, 1857 bp, Homo sapiens
  misc_feature (96)..(96): n=A,T,C, or G
  CDS (482)..(1597): n=A,T,C, or G
gtgaggggctcctttgggcaggggtagtgtttggtgtccctgtcttgcgtgatattgacaaactgaagctttcctgcaccactggacttaaggaanagtgtactcgtaggcggacagctttagtggccggccggccgctctcatcccccgtaaggagcagagtcctttgtactgaccaagatgagcaacatctacatccaggagcctcccacgaatgggaaggttttattgaaaactacagctggagatattgacatagagttgtggtccaaagaagctcctaaagcttgcagaaattttatcccaactttgtttggaagcttattatgacaataccatttttcatagagttgtgcctggtttcatagtccaaggcggagatcctactggcacagggagtggtggagagtctatctatggagcgccattcaaagatgaatttcattcacggttgcgttttaatcggagaggactggttgccatggcaaatgctggttctcatgataatggcacccactttttcttcacactgggtcgagcagatgaacttaacaataagcataccatctttggaaaggttacaggggatacagtatataacatgttgcgactgtcagaagtagacattgatgatgacgaaagaccacataatccacacaaaataaaaagctgtgaggttttgtttaatccttttgatgacatcattccaagggaaattaaaaggctgaaaaaagagaaaccagaggaggaagtaaagaaattgaaacccaaaggcacaaaaaattttagtttactttcatttggagaggaagctgaggaagaagaagaggaagtaaatcgagttagtcagagcatgaagggcaaaagcaaaagtagtcatgacttgcttaaggatgatccacatctcagttctgttccagttgtagaaagtgaaaaaggtgatgcaccagatttagttgatgatggagaagatgaaagtgcagagcatgatgaatatattgatggtgatgaaaagaacctgatgagagaaagaattgccaaaaaattaaaaaaggacacaagtgcgaatgttaaatcagctggagaaggagaagtggagaagaaatcagtcagccgcagtgaagagctcagaaaagaagcaagacaattaaaacgggaactcttagcagcaaaacaaaaaaaagtagaaaatgcagcaaaacaagcagaaaaaagaagtgaagaggaagaagcccctccagatggtgctgttgccgaatacagaagagaaaagcaaaagtatgaagctttgaggaagcaacagtcaaagaagggaacttcccgggaagatcagacccttgcactgctgaaccagtttaaatctaaactcactcaagcaattgctgaaacacctgaaaatgacattcctgaaacagaagtagaagatgatgaaggatggatgtcacatgtacttcagtttgaggataaaagcagaaaagtgaaagatgcaagcatgcaagactcagatacatttgaaatctatgatcctcggaatccagtgaataaaagaaggagggaagaaagcaaaaagctgatgagagagaaaaaagaaagaagataaaatgagaataatgataaccagaacttgctggaaatgtgcctacaatggccttgtaacagccattgttcccaacagcatcacttaggggtgtgaaaagaagtatttttgaacctgttgtctggttttgaaaaacaattatcttgttttgcaaattgtggaatgatgtaagcaaatgcttttggttactggtacatgtgttttttcctagctgaccttttatattgctaaatctgaaataaaataactttccttccaaa

SEQ ID NO: 234 - protein, 372 aa, Homo sapiens
MANAGSHDNGTHFFFTLGRADELNNKHTIFGKVTGDTVYNMLRLSEVDIDDDERPHNPHKIKSCEVLFNPFDDIIPREIKRLKKEKPEEEVKKLKPKGTKNFSLLSFGEEAEEEEEEVNRVSQSMKGKSKSSHDLLKDDPHLSSVPVVESEKGDAPDLVDDGEDESAEHDEYIDGDEKNLMRERIAKKLKKDTSANVKSAGEGEVEKKSVSRSEELRKEARQLKRELLAAKQKKVENAAKQAEKRSEEEEAPPDGAVAEYRREKQKYEALRKQQSKKGTSREDQTLALLNQFKSKLTQAIAETPENDIPETEVEDDEGWMSHVLQFEDKSRKVKDASMQDSDTFEIYDPRNPVNKRRREESKKLMREKKERR

SEQ ID NO: 235 - DNA, 7940 bp, Homo sapiens
  CDS (241)..(7560)
tcaagatggcggccaaggtggcgaagcagcagccgcggcggcggcggcggctggagtgagcgtccgactcgccgcgccgaacgaggtcccggtgtagggccgcgcgccgtggccgcgtcccactcctcaggccggggcgcacgtcggctcccacgcttagccagctcccggtggtttcctagaaacatgattgtttattggcattgatctcacagtctggtgaggacttctttactgataatgtcaagttcaggttatcctcccaaccaaggagcattcagcacagaacaaagtcgttatcctcctcactctgtccagtatacatttcccaacacccgccaccagcaggagttcgcagtccctgattatcgttcctctcatcttgaagtgagtcaggcatcacagcttttgcagcaacagcagcagcaacagcttcgaaggcgaccttccttgctttcagaatttcacccaggttctgacaggcctcaagaaaggagaactagttatgaaccgtttcatccaggcccatccccagtggatcatgattcactggaatcgaagcgaccacgtctggaacaggtttctgattctcattttcagcgtgtcagtgctgcggttttgcctttagtgcacccgctgccagaagggctgagggcttctgcagatgctaagaaggatccagcattcggaggcaaacatgaagctccatcctctccaatttcggggcaaccatgtggagatgatcaaaatgcttcaccttcaaaactctcaaaggaagagttaatacagagtatggatcgtgtagatcgagaaattgcaaaagtagaacagcagatccttaaactgaaaaagaaacaacaacagcttgaagaagaggcagctaaacctcctgagcctgagaagcccgtgtcccctcctcctgtggagcagaaacaccgcagtattgtccaaattatttatgatgagaatcggaaaaaagcagaagaagctcataaaatttttgaaggtcttggcccaaaagttgaactgccactgtataaccagccatcagataccaaggtgtaccatgagaacatcaagacaaaccaggtgatgaggaaaaaactcattttattttttaaaagaagaaatcatgcaagaaaacaaagggaacaaaaaatctgccagcgttatgatcagctcatggaggcatgggagaaaaaagtggacagaatagaaaataatcctcggaggaaagctaaagaaagcaaaacaagggaatactatgaaaagcagtttccagaaattcgaaaacaaagagaacagcaagaaagatttcagcgagttgggcagaggggagctggtctttcagccaccattgctaggagtgagcatgagatttctgaaattattgatgggctctctgagcaggagaataatgagaaacaaatgcggcagctctctgtgattccacctatgatgtttgatgcagaacaaagacgagtcaagttcattaacatgaatgggcttatggaggaccctatgaaagtgtataaagataggcagtttatgaatgtttggactgaccatgaaaaggagatctttaaggacaagtttatccagcatccaaaaaactttggactaattgcatcatacttggagaggaagagtgttcctgattgtgttttgtattactatttaaccaagaaaaatgagaattataaagccctcgtcagaaggaattatgggaaacgcagaggcagaaaccagcaaattgctcgaccctcgcaagaagaaaaagtagaagaaaaagaagaggataaagcagaaaaaacagaaaaaaaagaagaagaaaagaaagatgaagaggaaaaagatgaaaaagaagactccaaagaaaataccaaggaaaaggacaagatagatggtacagcagaagaaactgaggaaagagagcaagccacaccccgggggcgaaagactgccaacagtcagggccgccgtaagggccggatcaccaggtccatgacaaacgaagctgcagctgccagtgctgcagccgcagcggctactgaagagcccccaccacctctgccaccgccaccagaacccatttctacagagcctgtggagacctctcgatggacagaagaagaaatggaagttgctaaaaaaggtctagtagaacatggtcgtaactgggcagcaattgctaaaatggtgggaacgaaaagtgaagctcaatgtaaaaacttctattttaactataaaaggcgacacaatcttgacaacctcttacagcagcataaacagaaaacttcacgaaaacctcgtgaagagcgagatgtgtctcaatgtgaaagtgtcgcttccactgtttctgctcaggaggatgaagatattgaagcctccaatgaagaagaaaatccagaagacagcgaagttgaagctgtcaagcccagcgaggacagtcctgaaaatgctacttctcgaggaaacacagaacctgcggttgagcttgagcccaccacggaaactgcacccagtacatctccctccttagcagttccaagtacaaaaccagctgaagatgaaagtgtggagacccaggtgaatgacagcatcagtgctgagacagcagagcagatggatgtagatcagcaggagcacagtgctgaagagggttctgtttgtgatcccccacccgctaccaaagctgactctgtggacgttgaagtgagggtgccagaaaaccatgcatctaaagttgaaggtgataataccaaagaaagagacttggatagagccagtgagaaggtggaacctagagatgaagatttggtggtagctcagcaaataaatgcccaaaggcccgagccccagtcagacaatgattccagtgccacgtgcagcgctgatgaggatgtggatggagagccagagaggcagagaatgtttcctatggactcaaagccttcactgttaaaccccactggatctatactcgtctcatctccgttaaaaccaaatccactggatctgccacagcttcagcatcgagctgctgttatcccaccaatggtatcctgcaccccatgtaacataccaattggaaccccagtgagcggctatgctctctaccagcgacacattaaagcaatgcatgagtcagcactcctggaggagcagcggcagagacaagaacagatagatttggaatgtagaagttctacaagtccatgtggcacatccaagagtccaaacagagagtgggaagtccttcagcctgctccacatcaagtgataactaatctccctgaaggcgttcggcttccgacaactcgaccaaccaggccaccgccccctctcatcccgtcatccaaaaccacagtggcttcagaaaaaccatcttttataatgggaggctccatctcacagggaacaccaggcacttatttgacttctcataatcaggcttcctacactcaagaaacacccaagccgtcagtgggatctatctctcttggactgccacggcaacaggaatctgccaaatcagctactttgccctacatcaagcaggaagaattttctccccgaagccaaaactcacaacctgagggtctgttggtcagggcccaacatgaaggtgtagtcagaggtaccgcaggagccatacaagaaggaagtataactcggggaactccaaccagcaaaatttcagtggagagcattccatccctacggggctctatcactcagggcaccccggctctgccccagactggcataccaacagaggctttggtgaaggggtccatttcgagaatgcccattgaagacagcagtcctgagaaaggcagagaggaagctgcatccaaaggccatgttatttatgaaggcaaaagtggacatatcttgtcatatgataatattaagaatgcccgagaagggactaggagtccaagaacagctcatgaaatcagtttaaagagaagctatgaatcagtggaaggaaatataaagcaagggatgtcaatgagggagtctcctgtatcagcaccgttagaggggctgatatgccgagcattacccagggggagtcctcattctgacctcaaagaaaggactgtattgtctggctccataatgcaggggacaccaagagcaacaactgaaagctttgaagatggccttaaatatcccaaacaaattaaaagggaaagtcctcccatacgagcatttgaaggtgccattaccaaaggaaaaccatatgatggcatcaccaccatcaaagaaatggggcgttccattcatgagattccaaggcaagatattttaactcaggaaagtcggaaaactccagaagtggtccagagcacacggccgataattgagggttccatttcccagggcacaccaataaagtttgacaacaactcaggtcaatctgccatcaaacacaatgtcaaatccttaatcacggggcctagcaaactatcccgtggaatgcctccgctggaaattgtgccagagaacataaaagtggtagaacggggaaaatatgaggatgtgaaagcaggcgagaccgtgcgttcccggcacacgtcagtggtaagctctggcccctccgttcttaggtccacactgcatgaagctcccaaagcacaactgagccctgggatttatgatgacaccagtgcacggaggacccctgtgagttatcaaaacaccatgtccagaggctcacccatgatgaacagaacttctgatgttacaatttcttctaacaagtctaccaatcatgaaaggaaatcgacactgacccctacccagagggaaagtatcccagcgaagtctccagtgcctggggtggaccctgtcgtgagccacagtccgtttgatccccatcacagaggcagcactgcaggcgaggtttatcggagccacctgcccacgcacttggatccagccatgccttttcacagggctttggatcctgcagcggctgcttacctgtttcagagacagctttcaccaactccaggttacccaagtcagtatcagctttacgcaatggagaacacaagacagacaatcttaaatgattacattacctcacaacagatgcaagtgaacttgcgtccagatgtggccagaggactctccccaagagagcagccactgggtctcccatacccagcaacgagaggaatcattgacctgaccaatatgcctccaacaattttagtgcctcatccagggggaacaagcactcctcccatggacagaatcacttatattcctggtacacagattactttccctcccaggccgtacaactctgcttccatgtctccaggacacccaacacaccttgcagctgctgcaagtgctgagagggaacgggaacgggagcgggagaaggagcgggagcgggaacggattgctgcagcttcctccgacctctacctgcggccaggctcagaacagcctggccgacctggcagtcatggatatgttcgctccccttccccttcagtaagaactcaggagaccatgttgcaacagagacccagtgttttccaaggaaccaatggaaccagtgtaatcacacctttggatccaactgctcagctacgaatcatgccactgcctgctgggggcccttcaataagccaaggcctgccagcctcccgttacaacactgctgcggatgccctggctgctcttgtggatgctgcagcttctgcaccccagatggatgtgtccaaaacaaaagagagtaagcatgaagctgccaggttagaagaaaatttgagaagcaggtcagcagcagttagtgaacagcagcagctagagcagaaaaccctggaggtggagaagagatctgttcagtgtttatacacttcttcagcctttccaagtggcaagccccagcctcattcttcagtagtttattctgaggctgggaaagataaagggcctcctccaaaatccagatatgaggaagagctaaggaccagagggaagactaccattactgcagctaacttcatagacgtgatcatcacccggcaaattgcctcggacaaggatgcgagggaacgtggctctcaaagttcagactcttctagtagcttatcttctcacaggtatgaaacacctagcgatgctattgaggtgataagtcctgccagctcacctgcgccaccccaggagaaactgcagacctatcagccagaggttgttaaggcaaatcaagcggaaaatgatcctaccagacaatatgaaggaccattacatcactatcgaccacagcaggaatcaccatctccccaacaacagctgcccccttcttcacaggcagagggaatggggcaagtgcccaggacccatcggctgatcacacttgctgatcacatctgtcaaattatcacacaagattttgctagaaatcaagtttcctcgcagactccccagcagcctcctacttctacattccagaactcaccttctgctttggtatctacacctgtgaggactaaaacatcaaaccgttacagcccagaatcccaggctcagtctgtccatcatcaaagaccaggttcaagggtctctccagaaaatcttgtggacaaatccaggggaagtaggcctggaaaatccccagagaggagtcacgtctcttcggagccctacgagcccatctccccaccccaggttccggttgtgcatgagaaacaggacagcttgctgctcttgtctcagaggggcgcagagcctgcagagcagaggaatgatgcccgctcaccagggagtataagctacttgccttcattcttcaccaagcttgaaaatacatcacccatggttaaatcaaagaagcaggagatttttcgtaagttgaactcctctggtggaggtgactctgatatggcagctgctcagccaggaactgagatctttaatctgccagcagttactacgtcaggctcagttagctctagaggccattcttttgctgatcctgccagtaatcttgggctggaagacattatcaggaaggctctcatgggaagctttgatgacaaagttgaggatcatggagttgtcatgtcccagcctatgggagtagtgcctggtactgccaacacctcagttgtgaccagtggtgagacacgaagagaggaaggggacccatcacctcattcaggaggagtttgcaaaccaaagctgatcagcaagtcaaacagcaggaaatctaagtctcctatacctgggcaaggctacttaggaacggaacggccctcttcagtctcctctgtacattcagaaggggattaccataggcagacgccagggtgggcctgggaagacaggccctcttcaacaggctcaactcagtttccttataaccctctgactatgcggatgctcagcagtactccaccaacaccgattgcatgtgctccctctgcggtgaaccaagcagctcctcaccaacagaacaggatctgggagcgagagcctgccccactgctctcagcacagtacgagaccctgtcggatagtgatgactgaactgcacaaagtgaggggaacagggtgcaggagagggatctctagtttttgtggtttaatttttagtagcaggtcaaaaacctgccctcctgtgacttattccctgagacttttcaggagagccagcccacagatgatgaagaaatgatggaagttcatttggagagtcaaatgggaaaaaaacaaacaaaaaactgcctttgatacaggcaattcagtggactataataatagtggagggttgagatgtagagtttttaaaaagtgaacagttgctgttcttacatctgtaaagaaaaccataatgtctttaaatcactcttctgtaaatagatgacctttttgcagtgtaaaaaaaaaaaaaaaaaaaaaaaaaa

SEQ ID NO: 236 - protein, 2440 aa, Homo sapiens
MSSSGYPPNQGAFSTEQSRYPPHSVQYTFPNTRHQQEFAVPDYRSSHLEVSQASQLLQQQQQQQLRRRPSLLSEFHPGSDRPQERRTSYEPFHPGPSPVDHDSLESKRPRLEQVSDSHFQRVSAAVLPLVHPLPEGLRASADAKKDPAFGGKHEAPSSPISGQPCGDDQNASPSKLSKEELIQSMDRVDREIAKVEQQILKLKKKQQQLEEEAAKPPEPEKPVSPPPVEQKHRSIVQIIYDENRKKAEEAHKIFEGLGPKVELPLYNQPSDTKVYHENIKTNQVMRKKLILFFKRRNHARKQREQKICQRYDQLMEAWEKKVDRIENNPRRKAKESKTREYYEKQFPEIRKQREQQERFQRVGQRGAGLSATIARSEHEISEIIDGLSEQENNEKQMRQLSVIPPMMFDAEQRRVKFINMNGLMEDPMKVYKDRQFMNVWTDHEKEIFKDKFIQHPKNFGLIASYLERKSVPDCVLYYYLTKKNENYKALVRRNYGKRRGRNQQIARPSQEEKVEEKEEDKAEKTEKKEEEKKDEEEKDEKEDSKENTKEKDKIDGTAEETEEREQATPRGRKTANSQGRRKGRITRSMTNEAAAASAAAAAATEEPPPPLPPPPEPISTEPVETSRWTEEEMEVAKKGLVEHGRNWAAIAKMVGTKSEAQCKNFYFNYKRRHNLDNLLQQHKQKTSRKPREERDVSQCESVASTVSAQEDEDIEASNEEENPEDSEVEAVKPSEDSPENATSRGNTEPAVELEPTTETAPSTSPSLAVPSTKPAEDESVETQVNDSISAETAEQMDVDQQEHSAEEGSVCDPPPATKADSVDVEVRVPENHASKVEGDNTKERDLDRASEKVEPRDEDLVVAQQINAQRPEPQSDNDSSATCSADEDVDGEPERQRMFPMDSKPSLLNPTGSILVSSPLKPNPLDLPQLQHRAAVIPPMVSCTPCNIPIGTPVSGYALYQRHIKAMHESALLEEQRQRQEQIDLECRSSTSPCGTSKSPNREWEVLQPAPHQVITNLPEGVRLPTTRPTRPPPPLIPSSKTTVASEKPSFIMGGSISQGTPGTYLTSHNQASYTQETPKPSVGSISLGLPRQQESAKSATLPYIKQEEFSPRSQNSQPEGLLVRAQHEGVVRGTAGAIQEGSITRGTPTSKISVESIPSLRGSITQGTPALPQTGIPTEALVKGSISRMPIEDSSPEKGREEAASKGHVIYEGKSGHILSYDNIKNAREGTRSPRTAHEISLKRSYESVEGNIKQGMSMRESPVSAPLEGLICRALPRGSPHSDLKERTVLSGSIMQGTPRATTESFEDGLKYPKQIKRESPPIRAFEGAITKGKPYDGITTIKEMGRSIHEIPRQDILTQESRKTPEVVQSTRPIIEGSISQGTPIKFDNNSGQSAIKHNVKSLITGPSKLSRGMPPLEIVPENIKVVERGKYEDVKAGETVRSRHTSVVSSGPSVLRSTLHEAPKAQLSPGIYDDTSARRTPVSYQNTMSRGSPMMNRTSDVTISSNKSTNHERKSTLTPTQRESIPAKSPVPGVDPVVSHSPFDPHHRGSTAGEVYRSHLPTHLDPAMPFHRALDPAAAAYLFQRQLSPTPGYPSQYQLYAMENTRQTILNDYITSQQMQVNLRPDVARGLSPREQPLGLPYPATRGIIDLTNMPPTILVPHPGGTSTPPMDRITYIPGTQITFPPRPYNSASMSPGHPTHLAAAASAEREREREREKERERERIAAASSDLYLRPGSEQPGRPGSHGYVRSPSPSVRTQETMLQQRPSVFQGTNGTSVITPLDPTAQLRIMPLPAGGPSISQGLPASRYNTAADALAALVDAAASAPQMDVSKTKESKHEAARLEENLRSRSAAVSEQQQLEQKTLEVEKRSVQCLYTSSAFPSGKPQPHSSVVYSEAGKDKGPPPKSRYEEELRTRGKTTITAANFIDVIITRQIASDKDARERGSQSSDSSSSLSSHRYETPSDAIEVISPASSPAPPQEKLQTYQPEVVKANQAENDPTRQYEGPLHHYRPQQESPSPQQQLPPSSQAEGMGQVPRTHRLITLADHICQIITQDFARNQVSSQTPQQPPTSTFQNSPSALVSTPVRTKTSNRYSPESQAQSVHHQRPGSRVSPENLVDKSRGSRPGKSPERSHVSSEPYEPISPPQVPVVHEKQDSLLLLSQRGAEPAEQRNDARSPGSISYLPSFFTKLENTSPMVKSKKQEIFRKLNSSGGGDSDMAAAQPGTEIFNLPAVTTSGSVSSRGHSFADPASNLGLEDIIRKALMGSFDDKVEDHGVVMSQPMGVVPGTANTSVVTSGETRREEGDPSPHSGGVCKPKLISKSNSRKSKSPIPGQGYLGTERPSSVSSVHSEGDYHRQTPGWAWEDRPSSTGSTQFPYNPLTMRMLSSTPPTPIACAPSAVNQAAPHQQNRIWEREPAPLLSAQYETLSDSDD

SEQ ID NO: 237 - DNA, 2335 bp, Homo sapiens
  CDS (1021)..(1218)
ataaccatgcacactactataaccaccctaaccctgacttccctaattccccccatccttaccaccctcgttaaccctaacaaaaaaaactcatacccccattatgtaaaatccattgtcgcatccacctttattatcagtctcttccccacaacaatattcatgtgcctagaccaagaagttattatctcgaactgacactgagccacaacccaaacaacccagctctccctaagcttcaaactagactacttctccataatattcatccctgtagcattgttcgttacatggtccatcatagaattctcactgtgatatataaactcagacccaaacattaatcagttcttcaaatatctactcatcttcctaattaccatactaatcttagttaccgctaacaacctattccaactgttcatcggctgagagggcgtaggaattatatccttcttgctcatcagttgatgatacgcccgagcagatgccaacacagcagccattcaagcaatcctatacaaccgtatcggcgatatcggtttcatcctcgccttagcatgatttatcctacactccaactcatgagacccacaacaaatagcccttctaaacgctaatccaagcctcaccccactactaggcctcctcctagcagcagcaggcaaatcagcccaattaggtctccacccctgactcccctcagccatagaaggccccaccccagtctcagccctactccactcaagcactatagttgtagcaggaatcttcttactcatccgcttccaccccctagcagaaaatagcccactaatccaaactctaacactatgcttaggcgctatcaccactctgttcgcagcagtctgcgcccttacacaaaatgacatcaaaaaaatcgtagccttctccacttcaagtcaactaggactcataatagttacaatcggcatcaaccaaccacacctagcattcctgcacatctgtacccacgccttcttcaaagccatactatttatgtgctccgggtccatcatccacaaccttaacaatgaacaagatattcgaaaaataggaggactactcaaaaccatacctctcacttcaacctccctcaccattggcagcctagcattagcaggaatacctttcctcacaggtttctactccaaagaccacatcatcgaaaccgcaaacatatcatacacaaacgcctgagccctatctattactctcatcgctacctccctgacaagcgcctatagcactcgaataattcttctcaccctaacaggtcaacctcgcttccccacccttactaacattaacgaaaataaccccaccctactaaaccccattaaacgcctggcagccggaagcctattcgcaggatttctcattactaacaacatttcccccgcatcccccttccaaacaacaatccccctctacctaaaactcacagccctcgctgtcactttcctaggacttctaacagccctagacctcaactacctaaccaacaaacttaaaataaaatccccactatgcacattttatttctccaacatactcggattctaccctagcatcacacaccgcacaatcccctatctaggccttcttacgagccaaaacctgcccctactcctcctagacctaacctgactagaaaagctattacctaaaacaatttcacagcaccaaatctccacctccatcatcacctcaacccaaaaaggcataattaaactttacttcctctctttcttcttcccactcatcctaaccctactcctaatcacataacctattcccccgagcaatctcaattacaatatatacaccaacaaacaatgttcaaccagtaactactactaatcaacgcccataatcatacaaagcccccgcaccaataggatcctcccgaatcaaccctgacccctctccttcataaattattcagcttcctacactattaaagtttaccacaaccaccaccccaccatactctttcacccacagcaccaatcctacctccatcgctaaccccactaaaacactcaccaagacctcaacccctgacccccatgcctcaggatactcctcaatagccatcgctgtagtatatccaaagacaaccatcattccccctaaataaattaaaaaaactattaaacccatataacctcccccaaaattcagaataataacacacccgaccacaccgctaacaatcaatactaaacccccataaataggagaaggcttagaagaaaaccccacaaaccccattactaaacccaaaaaaaaaaaaaaaaaaaaaaaaaaa

SEQ ID NO: 238 - protein, 66 aa, Homo sapiens [sequence omitted]

1. A method of determining the presence of prostate cancer cells in a sample comprising nucleic acid, comprising:
contacting said sample with a polynucleotide probe under conditions effective for said probe to hybridize specifically to a target nucleic acid in said sample,
detecting the amount of hybridization between said probe and target nucleic acid, and
determining by said hybridization whether said target nucleic acid is differentially-regulated in said sample, whereby the presence of a differentially-regulated target nucleic acid indicates that said sample comprises cancer cells,
wherein said probe comprises a polynucleotide sequence which is selected from Table 1 or 2, a polynucleotide having 95% sequence identity or more to a polynucleotide sequence selected from Table 1 or 2, effective specific fragments thereof, or complements thereto.

2. A method of claim 1, wherein said determining comprises:
comparing the amount of hybridization in said sample with the amount of hybridization of said probe in a second sample comprising normal prostate.

3. A method of claim 1, wherein said probe is a contiguous sequence of at least 16 nucleotides selected from a polynucleotide of Table 1 or 2, or a complement thereto.

4. A method of claim 1, wherein said detecting is performed by Northern blot analysis, polymerase chain reaction (PCR), reverse transcriptase PCR, RACE PCR, or in situ hybridization.

5. A method for diagnosing a prostate cancer in a sample comprising prostate tissue, comprising:
determining the number of target genes which are differentially-regulated in said sample, wherein said target genes are selected from Table 1 or 2, or, a gene represented by a sequence having 95% sequence identity or more to a sequence selected from Table 1 or 2,
wherein said genes are differentially-regulated in prostate cancer, and
whereby said number is indicative of the probability that said sample comprises prostate cancer.

6. A method of claim 5, wherein said determining is performed by Northern blot analysis, polymerase chain reaction (PCR), reverse transcriptase PCR, RACE PCR, or in situ hybridization using a polynucleotide probe which is selected from Table 1 or 2, a polynucleotide having 95% sequence identity or more to a sequence set forth in Table 1 or 2, effective specific fragments thereof, or complements thereto.

7. A method of claim 5, wherein said determining is performed by:
contacting said sample with a polynucleotide probe under conditions effective for said probe to hybridize specifically to a target nucleic acid in said sample, and
detecting the amount of hybridization between said probe and target nucleic acid, and comparing the amount of hybridization in said sample with the amount of hybridization of said probe in a second sample comprising normal prostate tissue.

8. A method of clam 5, wherein said probe is a contiguous sequence of at least 16 nucleotides selected from a polynucleotide listed in Table 1 or 2, or a complement thereto.

9. A method of assessing a therapeutic or preventative intervention in a subject having a prostate cancer, comprising,
detecting the expression levels of differentially-regulated genes, wherein the target genes comprise a gene which is represented by a polynucleotide listed in Table 1 or 2 of claim 21, or, a gene represented by a sequence having 95% sequence identity thereto.

10. A method of claim 9, wherein said detecting is performed by Northern blot analysis, polymerase chain reaction (PCR), reverse transcriptase PCR, RACE PCR, or in situ hybridization using a polynucleotide probe which is selected from Table 1 or 2, a polynucleotide having 95% sequence identity or more to a polynucleotide selected from Table 1 or 2, effective specific fragments thereof, or complements thereto.

11. A method for identifying agents that modulate the expression of target polynucleotides differentially-regulated in prostate cancer cells, comprising,
contacting a prostate cell population with a test agent under conditions effective for said test agent to modulate the expression of a target polynucleotide in said cell population, and
determining whether said test agent modulates said target polynucleotide expression, wherein said target polynucleotide is selected from Table 1 or 2 of claim 21, a polynucleotide having 95% sequence identity thereto, effective specific fragments thereof, or complements thereto, and said polynucleotide is differentially-regulated in a prostate cancer.

12. A method of claim 1 1, wherein said agent is an antisense polynucleotide to a target polynucleotide sequence selected from Table 1 or 2 and which is effective to inhibit translation of said target polynucleotide.

13. A method for identifying agents that modulate a biological activity of a polypeptide differentially-regulated in prostate cancer cells, comprising,
contacting a polypeptide differentially-regulated in prostate cancer cells with a test agent under conditions effective for said test agent to modulate a biological activity of said polypeptide, and
determining whether said test agent modulates said biological activity, wherein said polypeptide is coded for by a polynucleotide listed in Table 1 or 2, of claim 21, a polynucleotide having 95% sequence identity thereto, effective specific fragments thereof, or complements thereto, and said polynucleotide is differentially-regulated in a prostate cancer.

14. A method of treating prostate cancer, comprising,
administering to a subject in need thereof a therapeutic agent which is effective for regulating expression of at least one gene selected from Table 1 or 2 of claim 21, wherein said gene is differentially-regulated in said cancer.

15. A method of claim 14, wherein said agent is an antibody or an antisense which is effective to inhibit translation of said gene.

16. A method of diagnosing a prostate cancer comprising:
assessing the expression of at least one gene selected from Table 1 or 2 of claim 21, wherein said gene is differentially-regulated in said cancer.

17. A method of claim 16, wherein assessing is:
measuring mRNA expression levels of said or measuring the expression levels of polypeptide coded for by said gene.

18. A method of claim 16, wherein said assessing detecting is performed by: Northern blot analysis, polymerase chain reaction (PCR), reverse transcriptase PCR, RACE PCR, or in situ hybridization, and
using a polynucleotide probe having a nucleotide sequence selected from a polynucleotide listed in Table 1 or 2, a polynucleotide having 95% sequence identity thereto, effective specific fragments thereof, or complements thereto.

19. A method of retrieving prostate cancer differentially-regulated gene sequences from a computer-readable medium, comprising:
selecting a gene expression profile that specifies that said gene is differentially-regulated in a prostate cancer, and retrieving prostate cancer differentially-regulated gene sequences,
where the gene sequences consist of the sequences of polynucleotides listed in Tables 1 or 2 of claim 21, a polynucleotide having 95% sequence identity thereto, effective specific fragments thereof, or complements thereto.

20. An ordered array of polynucleotide probes for detecting the expression of differentially-regulated prostate cancer genes in a sample, comprising:
polynucleotide probes associated with a solid support, wherein each probe is specific for a different differentially-regulated prostate cancer gene, and the probes comprise a nucleotide sequence selected the polynucleotides listed in from Table 1 or 2 of claim 21, or a complement thereto.

21. A computer-readable storage medium, consisting essentially of, one or more differentially-regulated cancer prostate genes which are selected from Table 1 or 2, a polynucleotide having 95% sequence identity thereto, effective specific fragments thereof, or complements thereto, and said polynucleotide is differentially-regulated in said prostate cancer.
